(19) United States
(12) Patent Application Publication
(10) Pub. No.: US 2026/0201380 A1
(43) Pub. Date: Jul. 16, 2026

(54) SEQUENCE FOR FORMING EDITING SUBSTRATE TOGETHER WITH TARGET RNA EDITING SITE

(71) Applicant: RECORNA (GUANGZHOU) BIOTECHNOLOGY CO., LTD, Guangzhou (CN)

(72) Inventors: Wenbing Yang, Guangzhou (CN); Rui Zhang, Guangzhou (CN)

(21) Appl. No.: 19/343,043

(22) Filed: Sep. 29, 2025

Related U.S. Application Data
(63) Continuation of application No. PCT/CN2023/085802, filed on Mar. 31, 2023.

(51) Int. Cl. C12N 15/113

(52) U.S. Cl. CPC C12N 15/113

(57) ABSTRACT

A sequence for forming an editing substrate together with a target RNA editing site. The sequence and the upstream and downstream portions of the target RNA editing site form a specific double-chain secondary structure, so that efficient editing of the target RNA editing site is realized.

### INCORPORATION-BY-REFERENCE OF MATERIAL SUBMITTED ELECTRONICALLY

[0001] Incorporated by reference in its entirety herein is a computer-readable sequence listing submitted concurrently herewith and identified as follows: One 14,834,857 Byte XML file named “Sequence_Listing.xml,” created on Sep. 26, 2025, and modified on Mar. 3, 2026.

### FIELD

[0002] The present disclosure belongs to the field of biomedicine, and relates to a sequence for forming an editing substrate together with a target RNA editing site.

### BACKGROUND

[0003] As one of the most important technologies in life sciences in recent years, gene editing has unlimited potential and advantages in treatment of diseases, especially genetic diseases, various chronic diseases and tumors. It is foreseeable that the next 5 to 10 years will be the golden age of rapid development of the gene editing technology gradually pushed into the clinic. The traditional treatment of genetic diseases and rare diseases, as well as the treatment concepts of some chronic diseases, geriatric diseases and tumors that threaten human health, will be completely subverted. Medical treatment based on gene editing will really help countless patients in the near future.

[0004] Gene editing can be divided into DNA editing and RNA editing according to different targets. Compared with DNA editing, RNA editing is intended to repair mutations at the RNA level without changing the genome sequence, is reversible and controllable, has safer characteristics, and has huge advantages in certain disease scenarios.

[0005] Currently, RNA editing specifically refers to single-base editing technology. Its principle is to use deaminase to change specific bases by deaminating ribonucleic acid. There are currently two main technical paths for targeted RNA editing. A first technique is a dual-molecule editing system (containing one exogenously expressed deaminase and one guide RNA).

[0006] A second technique is a single-molecule editing system, which delivers only a sequence that can recruit both endogenous deaminase and target editing sites. The second technique is currently successful only in recruiting ADAR for A-to-G targeted RNA editing. Compared to the exogenous ADAR expression system, the system that recruits endogenous ADAR only needs to deliver a fragment of antisense strand RNA to recruit endogenous ADAR to edit a specific RNA sequence site. This antisense strand RNA-based technique has a series of advantages such as fast drug preparation speed, security, and relatively mature delivery technique, and also has a series of advantages in clinical transformation and drug preparation. For example, this technology will not induce immune response, and can be applied to a plurality of developmental stages and a plurality of tissue types. It is easy to achieve tissue-specific gene editing and can achieve different levels of editing of a plurality of genes. Therefore, it has incomparable advantages over DNA editing technology in terms of security.

[0007] In the second technique, there are currently two methods for designing a guide RNA. A first guide RNA is composed of two segments. One segment is a self-generated ADAR substrate sequence with secondary structure characteristics that can recruit ADAR, and the other segment is a customizable targeting sequence for targeting a specific site for editing, where the targeting sequence and the target site form a completely complementary double-stranded RNA structure, except that the target site is set to A: C mismatch for facilitating editing of the target site (RESTORE method). Moreover, there is an optimized version of this method to reduce off-target editing (CLUSTER method). The guide RNA designed by the second method contain no recruitment sequence, but is a targeting sequence with a length of about 100 nt to 150 nt that is only complementary to the target sequence (LEAPER method). In the two methods, the regions complementary to the target sites are almost completely paired dsRNA double-stranded structures. Some studies have shown that almost completely paired dsRNA double-stranded structures are not the best ADAR editing substrates, so the two design methods exhibit low editing efficiency in vivo.

[0008] There are three levels of descriptions of the molecular structure of an RNA, including a primary sequence, a secondary structure, and a tertiary spatial structure. Although the tertiary spatial structure of the RNA is a stable structure formed in space, it is produced by the interaction between, or deformation, folding, or the like of secondary structural units. Furthermore, the tertiary structure of the RNA is difficult to obtain without the secondary structure of the RNA. Moreover, the prediction of the secondary structure of the RNA needs to consider not only the sequence arrangement, but also stable pairing modes, including pseudoknots and hairpins. The secondary structure of the RNA has two important roles. First, it can help explain the function of the RNA. The function of RNA is often related to the structure of the RNA. The secondary structure is the most crucial of all structures (the primary structure, the secondary structure, and the tertiary structure) of the RNA. Once the RNA is formed, it will undergo changes to form a specific tertiary structure. The formation of the tertiary structure depends on the matching between base pairs in the secondary structure. Second, the understanding of the secondary structure can also be used to explore a new function of the RNA.

[0009] Therefore, finding the secondary structure of a suitable editing substrate in suitable RNA editing is of great significance for improving the RNA editing efficiency.

### SUMMARY

[0010] In one aspect, the present application provides a sequence for forming an editing substrate together with a target RNA editing site, where the sequence, in the form of a complementary strand, forms a double-stranded secondary structure with upstream and downstream portions of the target RNA editing site, where a structure of the complementary strand includes at least one of sets of features indicated by i to x:
[0011] i. 0 to 4 mismatches, 0 to 7 wobble base pairs, 0 to 3 internal loops, 0 to 5 bulges, and 0 to 12 deletions from −100 to −81 of the editing site;
[0012] ii. 0 to 5 mismatches, 0 to 7 wobble base pairs, 0 to 5 internal loops, 0 to 5 bulges, and 0 to 15 deletions from −80 to −61 of the editing site;
[0013] iii. 0 to 5 mismatches, 0 to 7 wobble base pairs, 0 to 3 internal loops, 0 to 5 bulges, and 0 to 18 deletions from −60 to −41 of the editing site;
[0014] iv. 0 to 4 mismatches, 0 to 7 wobble base pairs, 0 to 3 internal loops, 0 to 8 bulges, and 0 to 11 deletions from −40 to −21 of the editing site;
[0015] v. 0 to 5 mismatches, 0 to 6 wobble base pairs, 0 to 4 internal loops, 0 to 5 bulges, and 0 to 9 deletions from −20 to −1 of the editing site;
[0016] vi. 0 to 5 mismatches, 0 to 7 wobble base pairs, 0 to 3 internal loops, 0 to 3 bulges, and 0 to 5 deletions from 0 to 19 of the editing site;
[0017] vii. 0 to 4 mismatches, 0 to 7 wobble base pairs, 0 to 3 internal loops, 0 to 6 bulges, and 0 to 9 deletions from 20 to 39 of the editing site;
[0018] viii. 0 to 5 mismatches, 0 to 6 wobble base pairs, 0 to 3 internal loops, 0 to 5 bulges, and 0 to 17 deletions from 40 to 59 of the editing site;
[0019] ix. 0 to 5 mismatches, 0 to 8 wobble base pairs, 0 to 4 internal loops, 0 to 5 bulges, and 0 to 19 deletions from 60 to 79 of the editing site; and
[0020] x. 0 to 4 mismatches, 0 to 6 wobble base pairs, 0 to 3 internal loops, 0 to 5 bulges, and 0 to 19 deletions from 80 to 100 of the editing site. In some embodiments, a mismatch type on the complementary strand is one of A-A, A-G, A-C, U-U, U-C, G-G, G-A, C-A, C-C, and C-U.

[0021] In some embodiments, the wobble base pair on the complementary strand is a G-U pair.

[0022] In some embodiments, the bulge on the complementary strand refers to that one base upstream of and one base downstream of a bulge region are both complementarily paired with a target editing strand and corresponding two bases of the target editing strand are consecutive. In some embodiments, the deletion on the complementary strand is that bases upstream and downstream of a deletion region are consecutive, and the target editing strand in the deletion region has a corresponding number of bases. In some embodiments, the internal loop on the complementary strand refers to that the target editing strand is complementarily paired with bases of the complementary strand, one upstream of and one downstream of the internal loop, and the internal loop has a corresponding number of bases mismatched.

[0023] In some embodiments, the double-stranded secondary structure is one selected from structures Struc1 to Struc1196. In some embodiments, structural features of the double-stranded secondary structure are as shown in Table 1.

[0024] In some embodiments, the structural features of the double-stranded secondary structure include one or more of:
[0025] a mismatch formed between bases, denoted by M;
[0026] wobble base pairing, denoted by W;
[0027] an internal loop, denoted by Li;
[0028] a deletion, denoted by D;
[0029] a bulge, denoted by Ii; and
[0030] Watson-Crick pairing, denoted by P.

[0031] In some embodiments, the double-stranded secondary structure has a feature denoted by X, X=[n1, n2, n3 . . . ], with n1, n2, . . . indicating positions of a structure X, where the editing site is at 0, -n indicates that the position is an n-th base upstream of the editing site, and n indicates that the position is an n-th base downstream of the editing site.

[0032] In some embodiments, when the double-stranded secondary structure X is M, M=[n1, n2, n3 . . . ] indicates that mismatches are present at positions of n1, n2, n3 . . . from the editing site.

[0033] When the double-stranded secondary structure X is W, W=[n1, n2, n3 . . . ] indicates that wobble base pairs are present at positions of n1, n2, n3 . . . from the editing site.

[0034] When the double-stranded secondary structure X is D, D=[n1, n2, n3 . . . ] indicates that deletions are present at positions of n1, n2, n3 . . . from the editing site.

[0035] When X is Ii, Ii=[n1, n2], with i being any positive integer indicating that i bases are inserted between n1 and n2 from the editing site.

[0036] When the double-stranded secondary structure X is Li, Li=[n1 to n2, n3 to n4 . . . ], with i being any positive integer indicating that internal loops having a size of i nt are formed in position ranges of n1 to n2, n3 to n4 . . . from the editing site.

[0037] In any double-stranded secondary structure, all positions are P except where X is one or more of M, W, D, Ii, and Li.

[0038] In some embodiments, a motif of the target RNA editing site, and one base upstream of and one base downstream of the RNA editing site is NAN. In some embodiments, the NAN is UAN, AAN, CAN, or GAN. In some embodiments, the UAN is UAG, UAU, UAC, or UAA. In some embodiments, the AAN is AAU, AAC, AAG, or AAA. In some embodiments, the CAN is CAU, CAG, CAC, or CAA. In some embodiments, the GAN is GAU, GAC, GAA, or GAG.

[0039] In some embodiments, when the motif of the target RNA editing site, and one base upstream of and one base downstream of the RNA editing site is NAN, the double-stranded secondary structure is selected from Struc1 to Struc1196 In some embodiments, when the motif of the target RNA editing site, and one base upstream of and one base downstream of the RNA editing site is UAA, the double-stranded secondary structure is selected from Struc1 to Struc143.

[0040] In some embodiments, when the motif of the target RNA editing site, and one base upstream of and one base downstream of the RNA editing site is UAG, the double-stranded secondary structure is selected from Struc144 to Struc260.

[0041] In some embodiments, when the motif of the target RNA editing site, and one base upstream of and one base downstream of the RNA editing site is UAU, the double-stranded secondary structure is selected from Struc261 to Struc320.

[0042] In some embodiments, when the motif of the target RNA editing site, and one base upstream of and one base downstream of the RNA editing site is UAC, the double-stranded secondary structure is selected from Struc321 to Struc395.

[0043] In some embodiments, when the motif of the target RNA editing site, and one base upstream of and one base downstream of the RNA editing site is CAA, the double-stranded secondary structure is selected from Struc396 to Struc515.

[0044] In some embodiments, when the motif of the target RNA editing site, and one base upstream of and one base downstream of the RNA editing site is CAC, the double-stranded secondary structure is selected from Struc516 to Struc541.

[0045] In some embodiments, when the motif of the target RNA editing site, and one base upstream of and one base downstream of the RNA editing site is AAG, the double-stranded secondary structure is selected from Struc542 to Struc684.

[0046] In some embodiments, when the motif of the target RNA editing site, and one base upstream of and one base downstream of the RNA editing site is AAC, the double-stranded secondary structure is selected from Struc685 to Struc767.

[0047] In some embodiments, when the motif of the target RNA editing site, and one base upstream of and one base downstream of the RNA editing site is GAA, the double-stranded secondary structure is selected from Struc768 to Struc809.

[0048] In some embodiments, when the motif of the target RNA editing site, and one base upstream of and one base downstream of the RNA editing site is AAG, the double-stranded secondary structure is selected from Struc810 to Struc875.

[0049] In some embodiments, when the motif of the target RNA editing site, and one base upstream of and one base downstream of the RNA editing site is AAU, the double-stranded secondary structure is selected from Struc876 to Struc982.

[0050] In some embodiments, when the motif of the target RNA editing site, and one base upstream of and one base downstream of the RNA editing site is CAG, the double-stranded secondary structure is selected from Struc983 to Struc1085.

[0051] In some embodiments, when the motif of the target RNA editing site, and one base upstream of and one base downstream of the RNA editing site is CAU, the double-stranded secondary structure is selected from Struc1086 to Struc1196.

[0052] In some embodiments, the complementary strand is complementarily base-paired at a non-mismatch or non-deletion or non-bulge or non-internal loop or non-wobble-base-pairing site.

[0053] In some embodiments, the sequence forming an editing substrate together with a target RNA editing site is 25 bp to 300 bp in length. In some embodiments, the sequence is 25 bp to 151 bp in length.

[0054] In some embodiments, the RNA is an RNA forming a specific secondary structure together with a target RNA to be edited.

[0055] In some embodiments, the target RNA to be edited is a messenger RNA (mRNA).

[0056] In some embodiments, the small RNA is miRNA, pri-miRNA, pre-miRNA, piRNA, siRNA, snoRNA, snRNA, exRNA, or scaRNA.

[0057] In one aspect, the present application provides an mcRNA, including a mimic domain, where a sequence of the mimic domain is the sequence for forming an editing substrate together with a target RNA editing site, and forms the double-stranded secondary structure together with a target RNA to be edited.

[0058] In some embodiments, the mcRNA further includes binding domains located at both ends of the mimic domain and complementarily paired with regions other than the double-stranded secondary structure of the target RNA to be edited.

[0059] In some embodiments, the binding domain is 0 to 55 bp in length on a single side.

[0060] In some embodiments, a sequence of the mcRNA is any one selected from sequences of SEQ ID NOs.: 1 to 16083.

[0061] In one aspect, the present application provides a design method for the mcRNA, including the following steps:
[0062] S1, obtaining a reference sequence: using a strand of a reference secondary structure where an editing site is located is an editing strand of the reference secondary structure and the other strand as a complementary strand of the reference secondary structure, and obtaining nucleotide sequences of both strands, respectively;
[0063] S2, obtaining a pre-mcRNA sequence of a target editing site: extending a preset length upstream and downstream from a site to be edited as a starting point to obtain a template sequence of a mimic domain, namely a target editing strand; and designing a sequence complementarily paired with the template sequence as the pre-mcRNA sequence;
[0064] S3, designing an mcRNA mimic domain: aligning the sequence of the target editing strand to a sequence of the editing strand of the reference secondary structure by extending from the editing site to both ends; aligning the pre-mcRNA sequence to a sequence of the complementary strand of the reference secondary structure; when an alignment result of the sequence of the target editing strand and the sequence of the editing strand of the reference secondary structure indicates consistency, setting a corresponding position of the mcRNA mimic domain to the corresponding sequence of the complementary strand of the reference secondary structure; and when the alignment result of the sequence of the target editing strand and the sequence of the editing strand of the reference secondary structure indicates inconsistency, setting and designing the corresponding position of the mcRNA mimic domain to a sequence forming a same structure as the corresponding reference secondary structure together with the target editing site; and
[0065] S4, designing mcRNA binding domains: on the basis of the mcRNA mimic domain designed in step S3, extending complementarily paired sequences a preset length from both ends of the mimic domain to form the binding domains.

[0066] In the present disclosure, a design method, i.e., mimic ADAR substrates structure approach (MASSA), is provided by simulating the structural features of the natural double-stranded RNA substrate with a high editing level in the human body, and an mcRNA with certain structural characteristics is formed with upstream and downstream sequences of a target site, thereby achieving an efficient target RNA editing effect.

[0067] In one aspect, the present application provides use of the sequence forming an editing substrate together with a target RNA editing site or the mcRNA in preparation of an RNA editing reagent or composition.

[0068] In one aspect, the present application provides an RNA editing reagent or composition including the sequence forming an editing substrate together with a target RNA editing site or the mcRNA.

[0069] In one aspect, the present application provides a method of editing a target RNA in a host cell, where an oligonucleotide including the sequence forming an editing substrate together with a target RNA editing site or the mcRNA is introduced into the host cell.

[0070] In some embodiments, the target RNA is ATP7B gene, FGFR gene, TP53 gene, APC gene, SERPINA1 gene, MECP2 gene, or SCN1A gene.

[0071] In one aspect, the present application provides use of the sequence forming an editing substrate together with a target RNA editing site or the mcRNA in preparation of a medicament for treating a disease or disorder, where the disease or disorder is an inherited genetic disease, or a disease or disorder associated with one or more acquired gene mutations.

[0072] In some embodiments, the disease or disorder is a monogenic disease or disorder.

[0073] In some embodiments, the disease or disorder is a polygenic disease or disorder.

[0074] In some embodiments, the gene is ATP7B, FGFR, TP53, APC, SERPINA1, MECP2, or SCN1A.

[0075] In some embodiments, the disease or disorder is selected from the group consisting of hepatolenticular degeneration, rett syndrome, Dravet syndrome, cystic fibrosis, Hurler syndrome, alpha-1-antitrypsin (A1AT) deficiency, Parkinson's disease, Alzheimer's disease, albinism, amyotrophic lateral sclerosis, asthma, beta-thalassemia, Cadasil syndrome, peroneal muscular atrophy, chronic obstructive pulmonary disease (COPD), distal spinal muscular atrophy (DSMA), Duchenne/Becker muscular dystrophy, dystrophic epidermolysis bullosa, epidermolysis bullosa, Fabry disease, Leiden factor V related disease, familial adenoma, polyposis, galactosemia, Gaucher's disease, glucose-6-phosphate dehydrogenase, hemophilia, hereditary hemochromatosis, Hunter syndrome, Huntington's disease, inflammatory bowel disease (IBD), hereditary polyagglutination syndrome, Leber congenital amaurosis, Lesch-Nyhan syndrome, Lynch syndrome, marfan syndrome, mucopolysaccharidosis, muscular dystrophy, myotonic dystrophy type 1 and type 2, neurofibroma, Niemann-Pick diseases type A, type B and type C, NY-esol-associated cancers, Peutz-Jeghers syndrome, phenylketonuria, Pompe's disease, primary eyelash disease, and prothrombin mutation-associated diseases such as prothrombin G20210A mutation, pulmonary hypertension, retinitis pigmentosa, Sandhoffs disease, severe complicated immunodeficiency syndrome (SCID), sickle cell anemia, spinal muscular atrophy, Steger's disease, Tay-Sahr's disease, Usher's syndrome, X-linked immunodeficiency, and cancers.

[0076] In some embodiments, the mcRNA may contain one or more modifications. In some embodiments, the mcRNA has one or more modified nucleotides, including nucleobase modifications and/or backbone modifications. Exemplary modifications to an RNA include, but are not limited to, phosphorothioate backbone modifications, and ribose-modified LNA.

[0077] The present disclosure serves as a basic platform capable of targeted editing of RNAs, such as a pre-messenger RNA, a messenger RNA, a ribosomal RNA, a transfer RNA, a long non-coding RNA, and a small RNA (e.g., miRNA). The methods of the present application can employ a number of delivery systems including, but not limited to, viruses, liposomes, electroporation, microinjection, and conjugation to achieve introduction of the mcRNAs as described herein or a construct into a host cell. Conventional viral- and non-viral-based gene transfer methods can be used to introduce nucleic acids into mammalian cells or target tissues. Such methods can be used to administer nucleic acids encoding the sequences of the present application to cultured cells or host organisms. Non-viral vector delivery systems include DNA plasmids, RNAs (e.g., transcripts of the constructs described herein), naked nucleic acids, and nucleic acids complexed with delivery vectors, e.g., liposomes. The viral vector delivery systems include DNA and RNA viruses having episomal or integrated genomes for delivery to the host cells.

[0078] The terms “oligonucleotide”, “nucleotide sequence”, and “nucleic acid” are used interchangeably. They refer to polymeric forms of nucleotides, deoxyribonucleotides, or ribonucleotides of any length, or analogs thereof.

[0079] In the context of the present application, “target RNA” refers to that the sequence of the present application is designed to be an RNA sequence completely complementary or substantially complementary thereto, and the hybridization between the target sequence and the sequence of the present application results in an RNA region containing the double-stranded secondary structure of the target adenosine, which recruits an adenosine deaminase (ADAR) acting on the RNA, which enzyme deaminates the target adenosine. In some embodiments, the ADAR is naturally present in a host cell, such as a eukaryotic cell (in some embodiments a mammalian cell, and in some embodiments a human cell). In some embodiments, the ADAR is introduced into a host cell.

[0080] The term “including” encompasses “including” as well as “consisting of”. For example, a composition “including X” may exclusively consist of X, or may include some additional components, e.g., X+Y. The term “about” with respect to the numerical value x is optional and, for example, refers to x±10%.

[0081] The expression “substantially” does not exclude “completely”. For example, a composition that is “substantially free of Y” may be completely free of Y. When relevant, the expression “substantially” may be omitted from the definitions of the present disclosure.

[0082] The term “complementary” as used herein refers to the fact that an oligonucleotide is hybridized with a target sequence under physiological conditions. The term does not mean that each nucleotide in the oligonucleotide is perfectly paired with its opposite nucleotide in the target sequence. In other words, while the oligonucleotide may be complementary to the target sequence, there may be mismatches, wobbles and/or bulges between the oligonucleotide and the target sequence. Meanwhile, the oligonucleotide is still hybridized with the target sequence under physiological conditions, so that the cellular RNA editing enzyme can edit the target adenosine. Accordingly, the term “substantially complementary” also means that the oligonucleotide has sufficient matching nucleotides between the oligonucleotide and the target sequence under the physiological condition of hybridization of the oligonucleotide with the target RNA, despite the presence of mismatches, wobbles and/or bulges. As shown herein, the oligonucleotide may be complementary, but may also include one or more mismatches, wobbles and/or bulges relative to the target sequence, as long as the oligonucleotide can be hybridized with its target under physiological conditions.

[0083] Regarding the sequence of a nucleic acid, the term “downstream” refers to continuing in the 3′ direction along the sequence, while the term “upstream” means the opposite. Thus, on any sequence encoding a polypeptide, the start codon is upstream of the stop codon in the positive-sense strand but downstream of the stop codon in the antisense strand.

[0084] Reference to “hybridization” generally refers to specific hybridization and excludes non-specific hybridization. Specific hybridization can be performed using techniques well known in the art under selected experimental conditions to ensure that most stable interactions between the probe and the target are at least 70%, In some embodiments at least 80%, and more In some embodiments at least 90% sequence identity between the probe and the target.

[0085] The term “mismatch” as used herein refers to opposing nucleotides in a double-stranded RNA complex do not form perfect base pairs according to the Watson-Crick base pairing rule. The mismatched nucleotides are A-A, A-G, A-C, U-U, U-C, G-G, G-A, C-A, C-C, C-U pairs.

### BRIEF DESCRIPTION OF THE DRAWINGS

[0086] FIG. 1 illustrates an example of features of a secondary structure of a double-stranded RNA. FIG. 1 shows the example of the features of the secondary structure of a segment of double-stranded RNA, where an editing strand is a strand where an editing site is located, and a complementary strand is a strand where a sequence forms a specific structure together with the editing strand is located. In the figure, position 0 is the position of the A base of the editing site, positions −1 to −22 are the positions of the sequence upstream of the editing site, and positions 1 to 16 are the positions of the sequence downstream of the editing site. As shown in the figure, the structural features include a mismatch, a bulge, a deletion, a wobble base, and an internal loop, and other positions are all Watson-Crick base pairs.

[0087] FIG. 2 is a schematic diagram of the MASSA method of the present application. FIG. 2 shows the schematic diagram of the MASSA method used in the present application. The left side of the figure is a schematic diagram of the secondary structure of the ADAR substrate, and the right side shows the mcRNA designed by the MASSA method according to the structure on the left side. In the figure, the asterisk indicates the position of the editing site; the upstream and downstream regions with structural features are mimic domains, simulating the features of the secondary structure of the substrate; and there are binding domains at both ends, and the binding domains form Watson-Crick complementary base pairs together with the sequence of the target site.

[0088] FIG. 3 illustrates editing levels of mcRNAs designed for a UAG motif of GAPDH gene in one embodiment of the present invention. FIG. 3 shows the results of the editing levels of the mcRNAs with combinations of mimic domains and binding domains of different lengths designed on the UAA motif of the GAPDH gene in one embodiment of the present disclosure. As shown in the figure, the lengths of the mimic domains are 91 nt, 61 nt, and 41 nt, respectively, and the lengths of the corresponding binding domains at both ends are 30 nt, 45 nt, and 55 nt, respectively. In the figure, the black dot represents the editing level of the mcRNA without structural feature and with only one mismatch design of A and C bases at the editing site, while other dots represent the editing levels of the mcRNAs with structural features, and the horizontal and vertical coordinates represent the editing levels of each mcRNA in two biological replicates.

[0089] FIG. 4 illustrates design patterns of mimic domains and binding domains of mcRNAs for different motifs of the GAPDH gene in one embodiment of the present disclosure. FIG. 4 shows the mcRNA design patterns on different motifs of the GAPDH gene in one embodiment of the present disclosure, mainly involving the positions and lengths of the mimic domains and the binding domains. As shown in the figure, the design mainly has three patterns. The first one is to extend, as the length of the mimic domain, 6 bases upstream and 14 bases downstream with the editing site as the center. The second one is to extend, as the length of the mimic domain, 10 bases upstream and 10 bases downstream with the editing site as the center. The third one is to extend, as the length of the mimic domain, 14 bases upstream and 6 bases downstream with the editing site as the center. In the first pattern, there is a binding domain of 20 bases downstream of the editing site. In the second pattern, there is a binding domain of 10 bases at each of two ends. In the third mode, there is a binding domain of 20 bases upstream of the editing site. The length of each reference design is 41 nt.

[0090] FIG. 5 illustrates editing levels of mcRNAs designed for a UAN motif of the GAPDH gene in one embodiment of the present disclosure. FIG. 5 shows a distribution of the editing levels of the mcRNAs designed for the UAN motif of the GAPDH gene in one embodiment of the present disclosure, where the included motifs are UAG, UAU, UAC, and UAA, respectively. The black dot represents the editing level of the mcRNA without structural feature and with only one mismatch design of A and C bases at the editing site, while other dots represent the editing levels of the mcRNAs with structural features designed in the present disclosure, and the horizontal and vertical coordinates represent the editing levels of each mcRNA in two biological replicates.

[0091] FIG. 6 illustrates target sites and off-target editing of mcRNAs designed for the UAN motif of the GAPDH gene in one embodiment of the present disclosure. FIG. 6 shows off-target editing heat maps of the mcRNAs designed for the UAN motif of the GAPDH gene at the target sites and in the upstream and downstream regions of the target sites in one embodiment of the present disclosure. The UAN motif includes UAG, UAU, UAC, and UAA. In the figure, the position 0 on the horizontal axis is the target site, −1 to −20 is a range upstream of the editing site, and 1 to 20 is a range downstream of the editing site. The vertical axis shows the editing levels of each mcRNA on different A bases. Arranged downward according to the highest editing sequences of the target sites, colors, blue to red, indicate the change trend of the editing levels of the A base sites from low to high.

[0092] FIG. 7 illustrates editing levels of mcRNAs designed for a CAN motif of the GAPDH gene in one embodiment of the present disclosure. FIG. 7 shows a distribution of the editing levels of the mcRNAs designed for the CAN motif of the GAPDH gene in one embodiment of the present disclosure, where the included motifs are CAA and CAC. The black dot represents the editing level of the mcRNA without structural feature and with only one mismatch design of A and C bases at the editing site, while other dots represent the editing levels of the mcRNAs with structural features designed in the present disclosure, and the horizontal and vertical coordinates represent the editing levels of each mcRNA in two biological replicates.

[0093] FIG. 8 illustrates target sites and off-target editing of mcRNAs designed for the CAN motif of the GAPDH gene in one embodiment of the present disclosure. FIG. 8 shows off-target editing heat maps of the mcRNAs designed for the CAN motif of the GAPDH gene at the target sites and in the upstream and downstream regions of the target sites in one embodiment of the present disclosure. The CAN motif includes CAA and CAC. In the figure, the position 0 on the horizontal axis is the target site, −1 to −20 is a range upstream of the editing site, and 1 to 20 is a range downstream of the editing site. The vertical axis shows the editing levels of each mcRNA on different A bases. Arranged downward according to the highest editing sequences of the target sites, colors, blue to red, indicate the change trend of the editing levels of the A base sites from low to high.

[0094] FIG. 9 illustrates editing levels of mcRNAs designed for an AAN motif of the GAPDH gene in one embodiment of the present disclosure. FIG. 9 shows a distribution of the editing levels of the mcRNAs designed for the AAN motif of the GAPDH gene in one embodiment of the present disclosure, where the included motifs are AAG and AAC. The black dot represents the editing level of the mcRNA without structural feature and with only one mismatch design of A and C bases at the editing site, while other dots represent the editing levels of the mcRNAs with structural features designed in the present disclosure, and the horizontal and vertical coordinates represent the editing levels of each mcRNA in two biological replicates.

[0095] FIG. 10 illustrates target sites and off-target editing of mcRNAs designed for the AAN motif of the GAPDH gene in one embodiment of the present disclosure. FIG. 10 shows off-target editing heat maps of the mcRNAs designed for the AAN motif of the GAPDH gene at the target sites and in the upstream and downstream regions of the target sites in one embodiment of the present disclosure. The AAN motif includes AAG and AAC. In the figure, the position 0 on the horizontal axis is the target site, −1 to −20 is a range upstream of the editing site, and 1 to 20 is a range downstream of the editing site. The vertical axis shows the editing levels of each mcRNA on different A bases. Arranged downward according to the highest editing sequences of the target sites, colors, blue to red, indicate the change trend of the editing levels of the A base sites from low to high.

[0096] FIG. 11 illustrates editing levels of mcRNAs designed for a GAN motif of the GAPDH gene in one embodiment of the present disclosure. FIG. 11 shows a distribution of the editing levels of the mcRNAs designed for the GAN motif of the GAPDH gene in one embodiment of the present disclosure, where the included motifs are GAG and GAA. The black dot represents the editing level of the mcRNA without structural feature and with only one mismatch design of A and C bases at the editing site, while other dots represent the editing levels of the mcRNAs with structural features designed in the present disclosure, and the horizontal and vertical coordinates represent the editing levels of each mcRNA in two biological replicates.

[0097] FIG. 12 illustrates target sites and off-target editing of mcRNAs designed for the GAN motif of the GAPDH gene in one embodiment of the present disclosure. FIG. 12 shows off-target editing heat maps of the mcRNAs designed for the GAN motif of the GAPDH gene at the target sites and in the upstream and downstream regions of the target sites in one embodiment of the present disclosure. The GAN motif includes GAG and GAA. In the figure, the position 0 on the horizontal axis is the target site, −1 to −20 is a range upstream of the editing site, and 1 to 20 is a range downstream of the editing site. The vertical axis shows the editing levels of each mcRNA on different A bases. Arranged downward according to the highest editing sequences of the target sites, colors, blue to red, indicate the change trend of the editing levels of the A base sites from low to high.

[0098] FIG. 13 illustrates editing levels of mcRNAs designed for a UAG motif of ATP7B gene in one embodiment of the present disclosure. FIG. 13 shows the editing levels of the mcRNAs of different lengths on the UAG motif of the ATP7B gene in one embodiment of the present disclosure, where the black dot indicates that the control mcRNA without secondary structural feature and with only one mismatch of A and C bases at the editing site; the horizontal and vertical coordinates represent the editing levels of each mcRNA in two biological replicates; len41 indicates that the mcRNA is 41 nt in length, and len31 indicates that the mcRNA is 31 nt in length.

[0099] FIG. 14 illustrates target sites and off-target editing of mcRNAs designed for the UAG motif of the ATP7B gene in one embodiment of the present disclosure. FIG. 14 shows a heat map of all mcRNAs of the UAG motif of the ATP7B gene edited at the target sites and off-target edited upstream and downstream in one embodiment of the present disclosure. In the figure, the position 0 on the horizontal axis is the target site, −1 to −20 is a range upstream of the editing site, and 1 to 20 is a range downstream of the editing site. The vertical axis shows the editing levels of each mcRNA on different A bases. Arranged downward according to the highest editing sequences of the target sites, colors, blue to red, indicate the change trend of the editing levels of the A base sites from low to high.

[0100] FIG. 15 illustrates editing levels of mcRNAs designed for an AAU motif of the ATP7B gene in one embodiment of the present disclosure. FIG. 15 shows the editing levels of the mcRNAs of different lengths on the AAU motif of the ATP7B gene in one embodiment of the present disclosure, where the black dot indicates that the control mcRNA without secondary structural feature and with only one mismatch of A and C bases at the editing site; the horizontal and vertical coordinates represent the editing levels of each mcRNA in two biological replicates; len41 indicates that the mcRNA is 41 nt in length, and len31 indicates that the mcRNA is 31 nt in length.

[0101] FIG. 16 illustrates target sites and off-target editing of mcRNAs designed for the AAU motif of the ATP7B gene in one embodiment of the present disclosure. FIG. 16 shows a heat map of all mcRNAs of the AAU motif of the ATP7B gene edited at the target sites and off-target edited upstream and downstream in one embodiment of the present disclosure. In the figure, the position 0 on the horizontal axis is the target site, −1 to −20 is a range upstream of the editing site, and 1 to 20 is a range downstream of the editing site. The vertical axis shows the editing levels of each mcRNA on different A bases. Arranged downward according to the highest editing sequences of the target sites, colors, blue to red, indicate the change trend of the editing levels of the A base sites from low to high.

[0102] FIG. 17 illustrates editing levels of mcRNAs designed for a CAG motif of FGFR gene in one embodiment of the present disclosure. FIG. 17 shows the editing levels of the mcRNAs of different lengths on the CAG motif of the FGFR gene in one embodiment of the present disclosure, where the black dot indicates that the control mcRNA without secondary structural feature and with only one mismatch of A and C bases at the editing site; the horizontal and vertical coordinates represent the editing levels of each mcRNA in two biological replicates; len41 indicates that the mcRNA is 41 nt in length, and len31 indicates that the mcRNA is 31 nt in length.

[0103] FIG. 18 illustrates target sites and off-target editing of mcRNAs designed for the CAG motif of the FGFR gene in one embodiment of the present disclosure. FIG. 18 shows a heat map of all mcRNAs of the CAG motif of the FGFR gene edited at the target sites and off-target edited upstream and downstream in one embodiment of the present disclosure. In the figure, the position 0 on the horizontal axis is the target site, −1 to −20 is a range upstream of the editing site, and 1 to 20 is a range downstream of the editing site. The vertical axis shows the editing levels of each mcRNA on different A bases. Arranged downward according to the highest editing sequences of the target sites, colors, blue to red, indicate the change trend of the editing levels of the A base sites from low to high.

[0104] FIG. 19 illustrates editing levels of mcRNAs designed for a GAG motif of APC gene in one embodiment of the present disclosure. FIG. 19 shows the editing levels of the mcRNAs of different lengths on the GAG motif of the APC gene in one embodiment of the present disclosure, where the black dot indicates that the control mcRNA without secondary structural feature and with only one mismatch of A and C bases at the editing site; the horizontal and vertical coordinates represent the editing levels of each mcRNA in two biological replicates; len41 indicates that the mcRNA is 41 nt in length, and len31 indicates that the mcRNA is 31 nt in length.

[0105] FIG. 20 illustrates target sites and off-target editing of mcRNAs designed for the GAG motif of the APC gene in one embodiment of the present disclosure. FIG. 20 shows a heat map of all mcRNAs of the CAG motif of the APC gene edited at the target sites and off-target edited upstream and downstream in one embodiment of the present disclosure. In the figure, the position 0 on the horizontal axis is the target site, −1 to −20 is a range upstream of the editing site, and 1 to 20 is a range downstream of the editing site. The vertical axis shows the editing levels of each mcRNA on different A bases. Arranged downward according to the highest editing sequences of the target sites, colors, blue to red, indicate the change trend of the editing levels of the A base sites from low to high.

[0106] FIG. 21 illustrates editing levels of mcRNAs designed for a UAG motif of the APC gene in one embodiment of the present disclosure. FIG. 21 shows the editing levels of the mcRNAs of different lengths on the UAG motif of the APC gene in one embodiment of the present disclosure, where the black dot indicates that the control mcRNA without secondary structural feature and with only one mismatch of A and C bases at the editing site; the horizontal and vertical coordinates represent the editing levels of each mcRNA in two biological replicates; len41 indicates that the mcRNA is 41 nt in length, and len31 indicates that the mcRNA is 31 nt in length.

[0107] FIG. 22 illustrates target sites and off-target editing of mcRNAs designed for the UAG motif of the APC gene in one embodiment of the present disclosure. FIG. 22 shows a heat map of all mcRNAs of the UAG motif of the APC gene edited at the target sites and off-target edited upstream and downstream in one embodiment of the present disclosure. In the figure, the position 0 on the horizontal axis is the target site, −1 to −20 is a range upstream of the editing site, and 1 to 20 is a range downstream of the editing site. The vertical axis shows the editing levels of each mcRNA on different A bases. Arranged downward according to the highest editing sequences of the target sites, colors, blue to red, indicate the change trend of the editing levels of the A base sites from low to high.

[0108] FIG. 23 illustrates editing levels of mcRNAs designed for another GAG motif of the APC gene in one embodiment of the present disclosure. FIG. 23 shows the editing levels of the mcRNAs of different lengths on the another GAG motif of the APC gene in one embodiment of the present disclosure, where the black dot indicates that the control mcRNA without secondary structural feature and with only one mismatch of A and C bases at the editing site; the horizontal and vertical coordinates represent the editing levels of each mcRNA in two biological replicates; len41 indicates that the mcRNA is 41 nt in length, and len31 indicates that the mcRNA is 31 nt in length.

[0109] FIG. 24 illustrates target sites and off-target editing of mcRNAs designed for another GAG motif of the APC gene in one embodiment of the present disclosure. FIG. 24 shows a heat map of all mcRNAs of another GAG motif of the APC gene edited at the target sites and off-target edited upstream and downstream in one embodiment of the present disclosure. In the figure, the position 0 on the horizontal axis is the target site, −1 to −20 is a range upstream of the editing site, and 1 to 20 is a range downstream of the editing site. The vertical axis shows the editing levels of each mcRNA on different A bases. Arranged downward according to the highest editing sequences of the target sites, colors, blue to red, indicate the change trend of the editing levels of the A base sites from low to high.

[0110] FIG. 25 illustrates editing levels of mcRNAs designed for a CAC motif of TP53 gene in one embodiment of the present disclosure. FIG. 25 shows the editing levels of the mcRNAs of different lengths on the CAC motif of the TP53 gene in one embodiment of the present disclosure, where the black dot indicates that the control mcRNA without secondary structural feature and with only one mismatch of A and C bases at the editing site; the horizontal and vertical coordinates represent the editing levels of each mcRNA in two biological replicates; len41 indicates that the mcRNA is 41 nt in length, and len31 indicates that the mcRNA is 31 nt in length.

[0111] FIG. 26 illustrates target sites and off-target editing of mcRNAs designed for the CAC motif design of the TP53 gene in one embodiment of the present disclosure. FIG. 26 shows a heat map of all mcRNAs of the CAC motif of the TP53 gene edited at the target sites and off-target edited upstream and downstream in one embodiment of the present disclosure. In the figure, the position 0 on the horizontal axis is the target site, −1 to −20 is a range upstream of the editing site, and 1 to 20 is a range downstream of the editing site. The vertical axis shows the editing levels of each mcRNA on different A bases. Arranged downward according to the highest editing sequences of the target sites, colors, blue to red, indicate the change trend of the editing levels of the A base sites from low to high.

[0112] FIG. 27 illustrates editing levels of mcRNAs designed for a CAG motif of the TP53 gene in one embodiment of the present disclosure. FIG. 27 shows the editing levels of the mcRNAs of different lengths on the CAG motif of the TP53 gene in one embodiment of the present disclosure, where the black dot indicates that the control mcRNA without secondary structural feature and with only one mismatch of A and C bases at the editing site; the horizontal and vertical coordinates represent the editing levels of each mcRNA in two biological replicates; len41 indicates that the mcRNA is 41 nt in length, and len31 indicates that the mcRNA is 31 nt in length.

[0113] FIG. 28 illustrates target sites and off-target editing of mcRNAs designed for the CAG motif of the TP53 gene in one embodiment of the present disclosure. FIG. 28 shows a heat map of all mcRNAs of the CAG motif of the TP53 gene edited at the target sites and off-target edited upstream and downstream in one embodiment of the present disclosure. In the figure, the position 0 on the horizontal axis is the target site, −1 to −20 is a range upstream of the editing site, and 1 to 20 is a range downstream of the editing site. The vertical axis shows the editing levels of each mcRNA on different A bases. Arranged downward according to the highest editing sequences of the target sites, colors, blue to red, indicate the change trend of the editing levels of the A base sites from low to high.

[0114] FIG. 29 illustrates editing levels of mcRNAs designed for a CAU motif of the TP53 gene in one embodiment of the present disclosure. FIG. 29 shows the editing levels of the mcRNAs of different lengths on the CAU motif of the TP53 gene in one embodiment of the present disclosure, where the black dot indicates that the control mcRNA without secondary structural feature and with only one mismatch of A and C bases at the editing site; the horizontal and vertical coordinates represent the editing levels of each mcRNA in two biological replicates; len41 indicates that the mcRNA is 41 nt in length, and len31 indicates that the mcRNA is 31 nt in length.

[0115] FIG. 30 illustrates target sites and off-target editing of mcRNAs designed for the CAU motif design of the TP53 gene in one embodiment of the present disclosure. FIG. 30 shows a heat map of all mcRNAs of the CAU motif of the TP53 gene edited at the target sites and off-target edited upstream and downstream in one embodiment of the present disclosure. In the figure, the position 0 on the horizontal axis is the target site, −1 to −20 is a range upstream of the editing site, and 1 to 20 is a range downstream of the editing site. The vertical axis shows the editing levels of each mcRNA on different A bases. Arranged downward according to the highest editing sequences of the target sites, colors, blue to red, indicate the change trend of the editing levels of the A base sites from low to high.

[0116] FIG. 31 illustrates verification and analysis of editing levels of mcRNAs obtained by high-throughput sequencing in one embodiment of the present disclosure. FIG. 31 shows verification, in an individual low-throughput manner, of the editing levels of the mcRNAs obtained by high-throughput sequencing in one embodiment of the present disclosure. The horizontal axis indicates the editing level of each mcRNA measured in the high-throughput sequencing method, and the vertical axis indicates an editing level obtained by Sanger sequencing after each mcRNA is separately synthesized into a modified RNA and transfected into a cell. A higher value of the correlation coefficient R2 indicates a higher correlation between the horizontal and vertical coordinates.

[0117] FIG. 32 illustrates a Sanger sequencing raw result of an editing level of a single mcRNA on GAPDH in one embodiment of the present disclosure. FIG. 32 shows a raw peak profile of an editing level of a single modified mcRNA transfected into a cell obtained by first-generation sequencing in one embodiment of the present disclosure. As shown in the figure, different bases correspond to peaks of different colors, with the A base corresponding to the green peak and the G base corresponding to the black peak. When peaks of different colors appear at a site, it indicates that there is a different base composition at the site, indicating the editing level of the A base in this result. The editing level is calculated by dividing the peak area of the G base by the sum of the peak areas of A the base and the G base at the site.

[0118] FIG. 33 illustrates mcRNA design patterns of different lengths of the UAG motif of the mouse GAPDH gene in one embodiment of the present disclosure. FIG. 33 shows mcRNAs designed with different lengths and different combinations of mimic domains and binding domains for the UAG motif of the mouse GAPDH gene in one embodiment of the present disclosure. As shown in the figure, the binding domains at both ends of the mcRNA having a length of 31 nt are 5 nt, while the mimic domain in the middle is 21 nt; the binding domains at both ends of the mcRNA having a length of 41 nt are 10 nt, while the mimic domain in the middle is 21 nt; the binding domains at both ends of the mcRNA having a length of 51 nt are 10 nt, while the mimic domain in the middle is 31 nt; the binding domains at both ends of the mcRNA having a length of 61 nt are 10 nt, while the mimic domain in the middle is 41 nt; and the binding domains at both ends of the mcRNA having a length of 71 nt are 10 nt, while the mimic domain in the middle is 51 nt.

[0119] FIG. 34 is a diagram showing editing levels of mcRNAs of different lengths for the UAG motif of the mouse GAPDH gene in one embodiment of the present disclosure. FIG. 34 shows mcRNAs of different lengths designed for the UAG motif of the mouse GAPDH gene in one embodiment of the present disclosure. Different numbers of mcRNAs are randomly selected from groups of different lengths to verify the editing level of a single mcRNAs. The cells used are mouse primary hepatocytes. The horizontal axis indicates mcRNAs of different lengths, and the vertical axis indicates the editing level of each mcRNA.

[0120] FIG. 35 illustrates raw peak profiles, obtained by first-generation sequencing Sanger, of editing levels of mcRNAs designed for the UAG motif of the mouse GAPDH gene in one embodiment of the present disclosure (biological replicate 1). FIG. 35 shows a raw peak profile of an editing level obtained by performing first-generation sequencing on a single modified mcRNA which is designed for the UAG motif of the mouse GAPDH gene and is transfected into a cell in one embodiment of the present disclosure (biological replicate 1). As shown in the figure, different bases correspond to peaks of different colors, with the A base corresponding to the green peak and the G base corresponding to the black peak. When peaks of different colors appear at a site, it indicates that there is a different base composition at the site, indicating the editing level of the A base in this result. The editing level is calculated by dividing the peak area of the G base by the sum of the peak areas of A the base and the G base at the site.

[0121] FIG. 36 illustrates raw peak profiles, obtained by first-generation sequencing Sanger, of editing levels of mcRNAs designed for the UAG motif of the mouse GAPDH gene in one embodiment of the present disclosure (biological replicate 2). FIG. 36 shows a raw peak profile of an editing level obtained by performing first-generation sequencing on a single modified mcRNA which is designed for the UAG motif of the mouse GAPDH gene and is transfected into a cell in one embodiment of the present disclosure (biological replicate 2). As shown in the figure, different bases correspond to peaks of different colors, with the A base corresponding to the green peak and the G base corresponding to the black peak. When peaks of different colors appear at a site, it indicates that there is a different base composition at the site, indicating the editing level of the A base in this result. The editing level is calculated by dividing the peak area of the G base by the sum of the peak areas of A the base and the G base at the site.

### DETAILED DESCRIPTION

[0122] Hereinafter, the technical solutions of the present disclosure will be further described with reference to specific examples, which do not represent a limitation on the scope of protection of the present disclosure. Some non-essential modifications and adjustments made by others in accordance with the concept of the present disclosure still fall within the scope of protection of the present disclosure.

[0123] Unless otherwise specified, the reagents, methods, and devices employed in the present disclosure are conventional reagents, methods, and devices in the art.

[0124] Unless otherwise specified, the reagents and materials used in the following examples are commercially available.

### Materials and Methods

### I. Construction of Human ADAR1 Expression Plasmid

[0125] The full-length sequence of the human ADAR1 was amplified by PCR and a homology arm was added. The pcDNA3.1 vector was linearized by double digestion with NheI and EcoRI digestion and an insertion fragment was ligated to the vector by homologous recombination.

II. Construction of High-Throughput Screening mcRNA Vector Library

[0126] First, the full-length fluorescent gene GFP and a gene fragment to be edited were amplified by PCR, with homologous sequences obtained by homologous recombination added to both ends. Moreover, the empty pcDNA3.1 vector was double-digested with NheI and HindIII, followed by linearized vector recovery. Multi-fragment recombination was then performed to achieve homologous recombination of the vector and the insertion fragment, completing the construction for a reporter gene vector. The mcRNA mixed sequence pool was amplified by PCR and a homology arm was added at the same time. The reporter gene vector was linearized by double digestion with BamHI and EcoRI, and the mcRNA sequence pool was inserted into the reporter gene vector by homologous recombination. After transformation and coating, all monoclones were collected together for plasmid extraction, and finally the mcRNA sequence pool plasmid library was obtained.

### III. HEK293 Cell Line Culture

### Steps of Cell Passage Experiment:

[0127] (1) An ultra-clean workbench was sterilized by ultraviolet irradiation for 30 minutes.
[0128] (2) Cells to be passaged were taken out from an incubator, and washed for three times with PBS first. The cells should be added, pipetted and discarded gently to prevent the cells from falling off. Then, 0.25% trypsin that could flood the cell surface was added. After the cells became rounded, a culture medium containing a serum was added to terminate digestion.
[0129] (3) The digested cell suspension was transferred into a 15 ml centrifuge tube and centrifuged at 1000 rpm at room temperature for 4 minutes.
[0130] (4) The supernatant was pipetted and discarded carefully. A fresh culture medium was added, and the cells were blown to form a single cell suspension.
[0131] (5) 20 ul Cell suspension was added to a 96-well cell culture plate, and then 20 ul trypan blue staining solution was added thereto. After blowing and mixing well, 20 ul mixture was aspirated and added to a cell counting plate, and cells were counted under a microscope.
[0132] (6) The volume of the cell suspension required for a specific number of cells was calculated according to the size of the inoculated cell culture plate, and a corresponding volume of fresh cell culture medium was added thereto and together put in a cell incubator for culture.

### IV. Steps of Cell Line Transfection Experiment:

[0133] (1) The required cell culture plate was set according to the amount of cells required by the experiment, and a certain amount of culture medium and a certain amount of cells were added to the corresponding culture plate according to the method of cell passage. The cell transfection experiment could be carried out when 70% confluence could be reached after cell growth for 24 hours.
[0134] (2) The ultra-clean workbench was sterilized by ultraviolet irradiation for 30 minutes.
[0135] (3) A mixed transfection reagent solution was prepared according to the instructions provided by the transfection reagent lipofectamine 3000, and let to stand at room temperature for 5 minutes.
[0136] (4) The cells were taken out, and the transfection solution was carefully added to the cells, gently mixed evenly and put in the incubator.

### V. Construction of ADAR1 Overexpressed HEK293 Cell Strain

[0137] According to the above steps of cell passage and transfection, the ADAR1 expression vector was transfected into HEK293 cells, and the screening drug G418 was added 48 hours later. The solution was changed every two days until there were no viable cells in the non-transfected group, thereby completing the screening of the HEK293 cell strain stably transfected with ADAR1.

### VI. Construction and Quality Inspection of Targeted Sequencing Library

[0138] The total cell RNAs could be extracted with a conventional RNA extraction kit to ensure that the RNAs were not obviously degraded. A conventional reverse transcription kit was adopted for reverse transcription reaction. During the first round of PCR amplification, sequencing linker sequences needed to be added at both ends of the amplification primer, and the number of cycles of the first round of amplification was controlled to be less than 20 cycles. The first-round PCR products were verified by agarose gel electrophoresis, followed by recovery of library fragments of the corresponding sizes. After purification, the second round of PCR amplification was carried out, where the second-round primer had sequencing linker sequences and specific base barcode sequences. The second round of PCR amplification was typically controlled to be less than 10 cycles. Again, the PCR products were subjected to agarose gel electrophoresis to confirm the sizes of the library fragments, and the purified library was recovered by gel cutting. Finally, the targeted sequencing library was subjected to second-generation sequencing.

### VII. Analysis of Targeted Sequencing Data

[0139] Firstly, the original data was subjected to linker removal processing by cutadapt software, and then the original read length after the linker removal was aligned to the reference sequence. According to the linker sequence, the editing of the reporter gene was corresponded to each mcRNA one to one, and then the editing level of the reporter gene was calculated to obtain the editing level of each mcRNA to the target site.

### VIII. Isolation and Culture of Mouse Primary Hepatocytes

[0140] (1) Preparation of 1× HBSS solution: 100 mL of 10× HBSS was put into a beaker, and then 850 mL of double distilled water was added thereto. Sodium bicarbonate powder was added to adjust the pH of the solution to 7.5. Finally, the solution was diluted to 1000 mL.
[0141] (2) Preparation of pre-perfusion fluid: 500 μL of EGTA solution with a concentration of 0.5 M (final concentration: 0.5 mM) was added to 500 mL 1× HBSS solution, filtered and sterilized, and freshly prepared for immediate use.
[0142] (3) Preparation of perfusion fluid: calcium chloride (final concentration: 3 mM) and collagenase IV (final concentration: 100 U/mL) were added to 500 mL of 1× HBSS solution, fully dissolved, filtered and sterilized, and freshly prepared for immediate use.
[0143] (4) Isotonic Percoll separation solution: 1 mL of 10× HBSS solution was added to 10 mL of Percoll solution, thereby obtaining the isotonic Percoll separation solution with a concentration of 90%.
[0144] (5) An electro-thermostatic water cabinet was turned on for preheating, where the preheating temperature of the water cabinet was 42° C. Reagents that needed to be preheated included the pre-perfusion fluid and the perfusion fluid.
[0145] (6) Surface sterilization: the surgical instruments and the operating table were sterilized with 75% alcohol.
[0146] (7) DMEM was pre-cooled on ice.
[0147] (8) A mouse was anesthetized by intraperitoneal injection.
[0148] (9) After the mouse was completely anesthetized, the mouse was fixed on a foam board, and the whole mouse was sterilized with 75% alcohol.
[0149] (10) Along the medioventral line, the skin and peritoneum of the mouse abdomen were cut open and fixed with a needle.
[0150] (11) A cotton swab was used to move the large and small intestines of the mouse to the right, exposing the portal vein (the vein through which blood flows into the liver, between the liver and stomach) and the inferior vena cava (the vein through which blood flows out of the liver) of the mouse.
[0151] (12) The mouse liver was gently pulled down with a cotton swab such that the superior vena cava at the junction of the liver and diaphragm was found and clamped with a vein clamp to block the blood flow back to the heart.
[0152] (13) A retention needle was inserted into the hepatic portal vein. When there was blood backflow in the hose after the needle core was withdrawn, it indicated successful insertion into the blood vessel. The hose of a peristaltic pump was connected into the retention needle and the inferior vena cava was cut off.
[0153] (14) The peristaltic pump was started to perfuse the pre-perfusion fluid into the mouse liver. The pre-perfusion fluid was always kept in a water bath at 42° C., the perfusion flow rate was 5 mL/min, and the perfusion time was 5 min. During the perfusion process, the inferior vena cava was compressed with a cotton swab every 30 s for 7 s, so that the pre-perfusion fluid filled the mouse liver (the liver was swelling due to water filling). The perfused liver should be white, and the liquid left by the inferior vena cava should not be red.
[0154] (15) The peristaltic pump was stopped. The pre-perfusion fluid was replaced with perfusion fluid (the perfusion fluid was always kept in the water bath at 42° C.) to continue to perfuse the liver, where the flow rate was adjusted to 3 mL/min, and the perfusion time was 8 min. During the perfusion process, the inferior vena cava was compressed with a cotton swab every 30 s for 7 s, so that the pre-perfusion fluid filled the mouse liver. The perfused liver should be soft and inelastic, and cracked lines could be seen on the surface of the liver.
[0155] (16) The liver was gently separated with scissors and tweezers (at this time, the liver became very fragile, so as to avoid breaking the capsule and causing hepatocytes to flow out), and put in a culture dish filled with DMEM. The surface of the liver was gently rinsed, and the gallbladder was removed (the whole process was carried out on ice).
[0156] (17) The liver was transferred to another clean culture dish filled with DMEM. The liver capsule was gently torn open with tip-curved forceps, and the liver was shaken. It could be seen that the hepatocytes flowed out, and the whole solution became turbid (the whole process was carried out on ice).
[0157] (18) The liver was shaken until all hepatocytes flowed out. At this time, only fibrous tissue was left in the whole liver. A rinsing solution was pipetted with a Pasteur pipette and filtered through a 70 μm cell strainer into a 50 mL centrifuge tube (the whole process was carried out on ice).
[0158] (19) After centrifuging with 50 g at 4° C. for 2 minutes, a large amount of hepatocytes could be seen precipitated at the bottom.
[0159] (20) The supernatant was removed. The hepatocytes were resuspended with 7.5 mL of DMEM, then added with 5 mL of isotonic Percoll separation solution, mixed well, and centrifuged with 200 g at 4° C. for 15 min.
[0160] (21) After density separation, the hepatocytes precipitated at the bottom were cells with good activity, and the cells suspended on the solution were dead cells and cells with poor activity. The supernatant was removed by suction in vacuum.
[0161] (22) The hepatocytes were rinsed twice with 15 mL of DMEM, and resuspended and precipitated with a hepatocyte plating medium, followed by cell counting and adjusting the cell density to 2×10⁵ cells/mL. The cells were seeded into a 12-well cell culture plate.
[0162] (23) After 4 hours, after the hepatocytes were completely adhered to the wall, a hepatocyte maintenance medium was used instead for next experiment.

### IX. Preparation of Sample for First-Generation Sequencing Sanger

[0163] Firstly, the total RNAs of cells were extracted and subjected to quality inspection by using a conventional commercially available RNA extraction kit, and the purified total RNAs were digested with DNases before the reverse transcription reaction. After reversal, the upstream and downstream sequences of the editing site were amplified with a common PCR amplification enzyme, and purified, and finally subjected to Sanger sequencing.

X. Measurement of Editing Level of RNA with Sanger Data

[0164] With the original sequencing file obtained by Sanger sequencing, the editing level of the editing site needed to be measured. In the disclosure, EditR software (https://moriaritylab.shinyapps.io/editr_v10/) was adopted for calculation and analysis. The software would analyze the peak of each of the A, T, G, and C bases in the upstream and downstream regions of the editing site, and the calculation approach for the editing level was 100*(1-A peak/sum of A+T+C+G peaks).

XI. Synthesis of Modified mcRNA

[0165] In some examples, the modified backbones and base sequences were chemically synthesized. The following types were mainly included: phosphorothioate backbone modification (with a structure as shown in Formula I), and ribose LNA modification (with a structure as shown in Formula II).

[chemical structure]

### Example 1. Design of 151 nt Long mcRNA by MASSA Method to Edit Specific Site of Human GAPDH Gene

[0166] In this example, a design method (FIG. 2), i.e., mimic ADAR substrates structure approach (MASSA), was develop by simulating the structural features of the natural double-stranded RNA substrate with a high editing level in the human body, and an mcRNA with certain structural characteristics was formed with upstream and downstream sequences of a target site, thereby achieving efficient target RNA editing.

[0167] In this example, the design of the present disclosure was verified by selecting the site where the motif No. 1323 of the human GAPDH gene was UAA. The mcRNA was designed by extending upstream and downstream, each for 75 nt, with a total length of 151 nt, with the editing site as the center. In this example, different lengths of mimic domains and binding domains were designed, where the lengths of the mimic domains were 41 nt, 61 nt, and 91 nt, and the lengths of the corresponding binding domains at both ends were 55 nt, 45 nt, and 30 nt, respectively. Furthermore, a control mcRNA without secondary structure characteristics was also designed in this example, and only the position aligned with the editing site was set to the C base, while other positions were complementary base pairs. The specific implementation steps of this example were as follows:

1) Preparation of mcRNA Reference Substrate Structure

[0168] According to the UAA editing motifs selected in this example, the secondary structures of the reference substrates of the corresponding UAA motifs were selected, and the features of the secondary structures of the corresponding lengths were extracted (as shown in Table 1). The strand where the editing site of the reference substrate was located was the editing strand of the reference substrate, and the other strand was the complementary strand of the reference substrate.

2) Construction of mcRNA Sequence Complementarily Paired with Target Editing Site

[0169] With the A bases of the UAA motifs on the GAPDH to be edited as centers, the mimic domains of the corresponding lengths were selected by extending upstream and downstream. The strand where the site to be edited was located was the target editing strand, and the strand where the mcRNA was located was the mcRNA strand.

3) Design of Mimic Domain of mcRNA Sequence

[0170] The base pairs of each target editing strand and each mcRNA sequence strand were aligned with those of the editing strand of the reference substrate and its complementary strand one by one. When the bases of the two editing strands were the same, the mcRNA strand sequence was directly set as the complementary strand sequence of the reference substrate. When the bases of the two were different, they were designed to be the same structure. For example, there was a mismatch of one base at a certain site, and the base at the corresponding position of the mcRNA sequence strand was designed as a mismatch. The sequence design of the whole mimic domain was completed according to such a principle.

4) Design of Binding Domain of mcRNA Sequence

[0171] On the basis of step 3, the complementarily paired sequences were directly extended at both ends of the mcRNA to complete the sequence design of the entire mcRNA. In this example, the lengths of the corresponding binding domains at both ends were 55 nt, 45 nt, and 30 nt, respectively.

5) Export of mcRNA Sequence Library

[0172] The RNAfold software was used to calculate the minimum free energy of the pairing region of the mcRNA and the target editing sequence, and the sequence information was exported, thereby completing the design of the mcRNA sequence library (see Table 2 for the mcRNA sequences designed in this example, in particular mcRNA661 to mcRNA1205, with the reference secondary structures of the mcRNA sequences shown in Table 1).

6) High-Throughput Verification of mcRNA Sequence Editing Effect

[0173] The synthesized mcRNA sequence library was constructed into a plasmid vector, and then the plasmid was transfected into ADAR1 overexpressed HEK293 cells. After 48 hours, the RNAs were extracted and the target site editing level corresponding to each mcRNA was analyzed by targeted library sequencing (as shown in FIG. 3).

TABLE 1
Table of Names and Features of Reference Secondary Structures

| Second- | |
|---|---|
| ary | |
| Struc- | |
| ture | Features of Secondary Structure |
| Struc1 | M = [−18, 6, 59, 73, 82], W = [−22, −19, 21, 66, 83], I2 = [36, 37], L1 = [10~12], L3 = [49~51] |
| Struc2 | M = [13, 18, 28, 30, 53, 56, 61, 98], W = [−7, 9, 10, 26, 27, 42, 51, 59, 84, 85, 100], D = [67, 68, 69, 70, 71, 72, 73, 74, 75, 76, 77, 78, |
| | 79, 80, 81], I1 = [92, 93], L2 = [21~22, 43~44] |
| Struc3 | M = [−86, −42, −40, −31, 0, 64, 90], W = [−74, −73, −45, −33, −17, −5, −4, 5, 6, 8, 13, 29, 32, 35, 36, 56], I1 = [−93, −92], I1 = [−62, −61], |
| | I15 = [−60, −59], I15 = [−58, −57], |
| | L2 = [−91~−89, −27~−26, −16~−15, −9~−8, 67~68], L3 = [10~12, 77~86], L5 = [−50~−46], L6 = [−65~−64] |
| Struc4 | M = [−10, 0, 9, 24, 42, 57, 69], W = [10, 11, 14, 21, 38, 48, 59, 75, 84, 85], L2 = [4~5, 80~81], L4 = [−18~−14] |
| Struc5 | M = [−74, −72, −8, 0, 16, 33, 48], W = [−84, −83, −76, −54, −43, −29, −19, −10, 17, 23, 27, 34], D = [38, 39, 40, 41], I3 = [−95, −94], I4 = [−44, −43], |
| | L2 = [−86~−85, 10~11], L3 = [−64~−62, 3~5, 19~21] |
| Struc6 | M = [−85, −65, −53, −29, −11, 0, 5, 34], W = [−80, −77, −76, −61, −54, −20, 19], D = [−36], I2 = [22, 23], I3 = [56, 57], L2 = [10~11], L3 = [17~18] |
| Struc7 | M = [-71, -68, -62, -58, 8, 11, 14, 25, 55], W = [-49, -18, -7, 13, 18, 51, 75, 87], D = [-33, 91, 92, 93, 94], I2 = [-41, -40], |
| | L2 = [-51~-50, -23~-22, 38~39], L4 = [-11~-8], L6 = [35~36] |
| Struc8 | M = [−85, −62, −53, 0, 5, 18, 21, 39], W = [−61, −20, 13, 34, 52], D = [−95, −36], L2 = [−30~−29, 10~11, 42~43], L3 = [−75~−73] |
| Struc9 | M = [−77, −67, −54, −34, 0, 13, 20, 24, 48], W = [−94, −86, −78, −60, −59, −52, −51, −40, −33, −30, −29, −23, 4, 50, 51, 55, 56, 60, 64, 68], |
| | D = [−91, −84], I2 = [−82, −81], |
| | I2 = [−71, −70], I6 = [−7, −6], I2 = [55, 56], L1 = [−75~−73], L2 = [5~6, 34~35], L3 = [−21~−19], L6 = [−14~−11] |
| Struc10 | M = [−33, −10, −4, 0, 11, 19, 27, 46, 73], W = [−59, −46, −14, −13, 3, 4, 9, 34, 78, 85, 86, 94], D = [62], L2 = [−19~−18, 22~23, 53~54, 96~97], |
| | L3 = [88~90], L4 = [37~42] |
| Struc11 | M = [−73, −54, −40, −33, −28, 41, 54, 65, 76], W = [−86, −47, −41, −26, −7, 2, 10, 14, 23, 30, 92, 93, 94], D = [5], I1 = [12, 13], L2 = [−64~−63], |
| | L3 = [18~20, 31~33], L4 = [−21~−18] |
| Struc12 | M = [−94, −74, −58, −8, 0, 39], W = [−84, −71, −54, −29, −19, −10, −9, 17, 22, 27, 47], D = [−83], I1 = [24, 25], L2 = [−39~−38], |
| | L3 = [−88~−87, −52~−50, 9~11, 48~50] |
| Struc13 | M = [−57, −35, −14, −10, −8, 0, 9, 12, 21, 76, 78, 83, 96], W = [−65, −63, −62, −53, −47, −46, −24, −19, −18, 3, 27, 28, 59, 74, 79], |
| | D = [44, 51, 52, 53, 54, 55], |
| | I1 = [4, 5], L10 = [29~31], L2 = [35~36, 68~69], L4 = [87~90] |
| Struc14 | M = [−87, −72, −37, −30, −24, −15, 0, 3, 6, 11, 42, 73], W = [−80, −74, −73, −34, −13, −12, 5, 35, 43, 45, 67], D = [−94], I1 = [38, 39], |
| | L1 = [−21~−20], L2 = [−52~−51], L3 = [49~51], L5 = [65~66] |
| Struc15 | M = [−95, −76, −73, −70, −59, −46, −15, 0, 22, 39, 43, 89, 98], W = [−87, −74, −30, −26, −18, −13, 2, 18, 19, 21, 40, 50, 76], D = [64, 65, 66, 67], |
| | I4 = [−4, −3], |
| | I1 = [26, 27], L1 = [−34~−32], L2 = [−90~−89, −60~−80, −65~−64, −52~−51, 8~10, 55~58], L3 = [−27~−27, −21~−19, 70~72], L4 = [30~33] |
| Struc16 | M = [−6, 7, 10, 15, 26, 51, 61, 63, 68, 76], W = [−23, −22, −19, −18, −17, 21, 25, 27, 53, 67, 73], D = [37, 38], L2 = [29~30] |
| Struc17 | M = [4, 7, 12, 15, 26, 39, 45], W = [−23, −22, −19, −18, 21, 27, 53, 54, 61, 66, 84, 85], I1 = [98, 99], L1 = [76~81], L2 = [29~30], L4 = [−8~−6] |
| Struc18 | M = [−17, 4, 10, 38, 55], W = [15, 21, 26, 54, 68], I1 = [−20, −19], L2 = [31~32, 79~82], L3 = [85~87] |
| Struc19 | M = [−19, 3, 12, 21, 68, 77], W = [−22, −16, −11, 5, 19, 44, 45, 72, 85], I1 = [25, 26], L2 = [29~31] |
| Struc20 | M = [−32, −15, 0, 13, 20, 46, 50], W = [−90, −69, −4, 4, 10, 24, 59], L1 = [8~9], L2 = [14~15], L3 = [−68~−67, −58~−56], L5 = [−51~−47], L6 = [33~38] |
| Struc21 | M = [−30, −27, −20, 0, 4, 7, 12, 28, 42], W = [−83, −80, −72, −71, −64, −51, −37, −31, −14, 8, 11, 34, 35, 38, 43, 50, 51], D = [−96, −95], |
| | L1 = [55~57], L2 = [−77~−74], L3 = [−88~−86], L4 = [−8~−8] |
| Struc22 | M = [−11, 0, 4, 11, 29, 38, 85, 8, 92], W = [−19, −18, 18, 21, 26, 68, 78, 96], D = [74], I1 = [71, 72], L2 = [−16~−15, 44~45], L3 = [50~52], L5 = [−7~−7] |
| Struc23 | M = [−70, −68, −58, −37, −25, 3, 53, 70, 78], W = [−87, −61, −60, −7, 10, 31, 58, 62, 75, 76, 84, 92, 96], D = [45], I3 = [−31, −30], I1 = [93, 94], |
| | L1 = [26~27, 86~91], |
| | L2 = [−97~−96, −49~−49, −22~−21, −11~−10, 82~83], L6 = [31~36] |
| Struc24 | M = [−18, 4, 27, 43, 51, 73, 85], W = [−19, −16, 21, 30, 31, 37, 45] |
| Struc25 | M = [−87, −76, −27, −16, −4, 0, 18, 26, 31, 35, 42, 45], W = [−98, −95, −91, −90, −63, −58, −51, −39, −31, −26, −24, −8, 2, 29, 66, 70, 75, 77, 93], |
| | D = [−69, 59, 81, 85, 86, 87], |
| | I1 = [−82, −81], I1 = [56, 57], I1 = [63, 64], I1 = [73, 74], L1 = [59~60], L2 = [−47~−46], L3 = [11~13] |
| Struc26 | M = [−33, −24, 23, 29, 40, 45, 53, 68, 79, 85], W = [−35, −31, −30, −29, −21, −20, −14, 7, 21, 22, 24, 65, 69, 87, 97, 98], I1 = [91, 92], |
| | L2 = [−11~−10, 0~1], L3 = [11~13], L4 = [57~60] |
| Struc27 | M = [−52, −15, 0, 10, 18, 30, 36, 42, 73, 75, 80, 85, 90], W = [−91, −47, −40, −39, −14, −13, −12, −8, −5, −4, 2, 5, 12, 37, 66], D = [54], L2 = [94~95], |
| | L3 = [−59~−58], L4 = [58~62], L5 = [−68~−64] |
| Struc28 | M = [−24, −10, −5, 11, 13, 16, 40, 53, 79], W = [−30, −14, −7, 7, 21, 24, 62, 63, 65, 69, 97], L2 = [−32~−31, 0~1, 22~23, 60~61], L3 = [28~30], L6 = [82~87] |
| Struc29 | M = [−96, −90, −65, −49, 0, 10, 30, 34, 36, 39, 42, 67, 85, 95], W = [−91, −89, −51, −40, −39, −14, −13, −8, −5, −4, 2, 5, 6, 7, 10], D = [−62, 13, 14], |
| | I14 = [−70, −69], |
| | I1 = [−61, −60], I1 = [63, 64], L2 = [−27~−26], L3 = [89~90] |
| Struc30 | M = [−93, −85, −27, 8, 14, 22, 27, 32, 37, 41, 58, 14, 17], W = [−92, −91, −77, −71, −69, −40, −28, −16, 29, 38, 66, 68, 69, 83], |
| | D = [−57, −53, −10, −9, −8, 25], I2 = [−23, −22], |
| | I1 = [−17, −16], I1 = [5, 6], I4 = [34, 35], L2 = [−98~−97, −80~−79, 50~51, 60~61], L4 = [−63~−62] |
| Struc31 | M = [−60, −53, −48, −9, 0, 13, 18, 25, 35, 46, 51, 67, 73, 80], W = [−49, −40, −37, −8, 14, 28, 29, 30, 40, 75, 76, 82, 90], D = [−31, 61, 62], I1 = [−45, −44], |
| | I1 = [−43, −42], I1 = [−24, −23], L2 = [−57~−56, −27~−26, 5~6] |
| Struc32 | M = [−23, 4, 8, 31, 42, 59, 66, 89, 97], W = [−7, −6, 27, 38, 53], I1 = [84, 85], L3 = [75~78] |
| Struc33 | M = [−94, −84, −42, −30, −20, −8, 0, 4, 10, 26, 31, 37, 39, 58], W = [−71, −64, −55, −29, −12, 13, 32, 34, 50, 51], L2 = [−28~−27], L4 = [−78~−75] |
| Struc34 | M = [−29, 0, 9, 46, 50, 54, 59, 63], W = [−17, 4, 10, 12, 22, 60, 74, 75], I11 = [−32, −31], I15 = [29, 30], L2 = [32~33], L3 = [−14~−12], L6 = [65~70], |
| | L8 = [27~28], L11 = [37~38] |
| Struc35 | M = [−5, 62, 85], W = [6, 24, 27, 43, 4, 55], D = [13], I1 = [8, 9], I7 = [23, 24], I14 = [26, 27], I15 = [43, 44], L2 = [−23~−22, 70~71], L4 = [−10~−7], |
| | L5 = [36~37], L6 = [32~34] |
| Struc36 | M = [−22, −19, 0, 3, 9, 44, 51], W = [−49, −28, −16, 22], D = [−5, 34, 37, 38, 39, 40, 41], L2 = [−41~−40, 23~24], L3 = [−9~−8] |
| Struc37 | M = [−17, 4, 15, 27, 33, 56, 67, 71, 96], W = [−19, 7, 10, 21, 26, 30, 31, 98], D = [37, 38], L4 = [−8~−5] |
| Struc38 | M = [−22, −5, 3, 25, 30, 59, 62, 71, 85], W = [−17, −14, −13, −10, −6, 6, 21, 43, 44, 55, 63, 65, 68], D = [−19], I2 = [−17, −16], I4 = [−14, −13], |
| | I1 = [−10, −9], I7 = [38, 39], L2 = [7~8], L11 = [32~36], L4 = [75~16] |
| Struc39 | M = [−78, −73, −55, −42, −37, −22, −15, −7, −3, 11, 14, 45, 46, 88], W = [−93, −89, −87, −72, −65, −4, 6, 36, 69, 75], L9 = [−30~−27], L2 = [−47~−46, 51~62] |
| Struc40 | M = [−23, −17, 12, 19, 43, 48, 53, 58, 73, 84], W = [−18, 5, 22, 29, 40, 42, 44, 45, 72, 74], I1 = [25, 26], L1 = [30~31], L2 = [−7~−5, 35~36, 67~68, 93~94], |
| | L3 = [77~79] |
| Struc41 | M = [−81, −47, −36, −23, −13, −8, 0, 4, 10, 27, 50], W = [−87, −84, −83, −60, −40, −37, −22, −19, −17, −12, 35, 68], L2 = [−75~−74, −52~−51, 17~18, 62~64] |
| Struc42 | M = [−14, −10, 18], W = [−60, −53, −50, −18, −9, −6, 3, 6, 12, 13, 28, 52, 65, 66, 67, 71, 72, 74, 76, 79, 85], D = [−64, −59, −58, −57, −54], I3 = [−50, −49], |
| | I1 = [6, 7], |
| | I1 = [62, 63], I11 = [87, 88], L1 = [54~58], L2 = [−5~−4, 21~22, 50~51, 75~76], L4 = [35~38, 63~64], L5 = [69~70], L6 = [79~84], L9 = [29~30] |
| Struc43 | M = [−63, −51, −49, 0, 3, 35], W = [−83, −69, −59, −48, −43, −4, 2, 5, 37, 59], D = [−75, −74, −73, −72, −71, −70], L2 = [−98~−97, −15~−15, 15~17, 30~31], |
| | L3 = [11~13], L5 = [−30~−26] |
| Struc44 | M = [5, 7, 43, 53, 58, 75, 87], W = [−4, −3, 35, 44, 49, 63, 66, 92, 93], D = [23], I1 = [78, 79], I2 = [96, 97], I1 = [98, 99], L1 = [71~72], |
| | L2 = [0~1, 37~38, 61~62], L3 = [83~84], L4 = [46~48] |
| Struc45 | M = [−79, −66, −64, −36, −34, −22, 0, 24, 27, 39, 53, 72, 92, 95], W = [−99, −67, −45, −39, −28, 37, 79, 88, 96], D = [11, 35, 36], |
| | I1 = [30, 31], L2 = [19~20, 56~57] |
| Struc46 | M = [−85, −62, −53, −13, −4, 18, 21, 61], W = [−61, −52, −44, −25, −20, −19, −7, 34, 51], D = [6], I1 = [33, 34], L1 = [−38~−37], |
| | L2 = [−30~−29, 10~11, 37~38, 42~43], L3 = [−75~−73, 0~1] |
| Struc47 | M = [5, 22, 33, 53], W = [−17, −16, −5, 4, 37, 85], D = [30, 41, 61, 62, 63, 64, 80], I1 = [82, 83], I2 = [96, 97], L1 = [68~71], L2 = [35~36], |
| | L3 = [73~75, 89~91], L5 = [25~28] |
| Struc48 | M = [−10, 11, 13, 23, 43, 53, 71], W = [−30, −26, −21, −14, 7, 8, 17, 21, 69, 97, 98, 100], L10 = [78~87], L2 = [−32~−31, −25~−24, 0~1], L3 = [28~30, 64~66] |
| Struc49 | M = [5, 30, 71, 89, 94], W = [−19, −4, 7, 21, 31, 44, 68, 76, 77, 79, 85], I5 = [−19, −18], L2 = [42~43, 53~54, 60~61, 74~75, 83~84] |
| Struc50 | M = [−25, 7, 27, 49, 57, 62, 67, 70, 93, 97], W = [8, 20, 21, 22, 30, 31, 37, 46, 51, 78], I1 = [−20, −19], I1 = [0, 1], L2 = [74~75], L3 = [98~99], |
| | L4 = [42~45], L6 = [−17~−15], L10 = [83~89] |
| Struc51 | M = [0, 4, 31, 36, 47, 51, 54, 66, 69, 76, 91], W = [−16, −7, 21, 26, 40, 46, 74], D = [38, 39], L2 = [84~85] |
| Struc52 | M = [−33, −19, −10, 0, 11, 14, 22, 73, 77, 90], W = [−25, −6, 4, 9, 13, 85, 86], D = [−57, −56, 62], I6 = [68, 65], L1 = [37~38] |
| Struc53 | M = [−9, 3, 7, 18, 28, 30, 32, 36, 43, 45, 56, 61, 67], W = [−7, 9, 10, 24, 26, 31, 40, 59, 75, 77, 79, 84], D = [93, 94, 95, 96, 97, 98, 99], L2 = [73~14] |
| Struc54 | M = [−14, −6, 7, 26, 30, 67, 89, 93], W = [−23, −19, 3, 4, 22, 33, 35, 36, 38, 77, 79], L2 = [43~44, 57~58, 84~85] |
| Struc55 | M = [−59, −56, −41, −38, −34, 7, 82], W = [−47, −31, −27, 51, 57, 64, 69, 70], I7 = [−82, −81], I8 = [−20, −19], L2 = [−85~−85, 14~15, 35~36], |
| | L3 = [−73~−71, 39~41], L4 = [47~49], L5 = [0~4], L6 = [−91~−89] |
| Struc56 | M = [−60, −54, −41, −34, −27, 3, 61, 82, 95], W = [−70, −66, −56, −49, −48, −17, −6, 8, 12, 23, 24, 27, 31, 55, 59, 60, 70, 14, 98], D = [−72], I1 = [67, 68], |
| | L8 = [88~90], L1 = [−65~−62, −8~−7], L2 = [−19~−18, 0~1, 6~7, 35~36, 45~46, 77~78], L3 = [−12~−11, 64~65] |
| Struc57 | M = [−64, −28, 35, 65, 76], W = [−86, −72, −41, −26, −17, −9, −7, 2, 10, 34, 52, 75, 86, 93], D = [70], L1 = [0~1], L2 = [−71~−71, 32~33], L4 = [−21~−18] |
| Struc58 | M = [−98, −93, −75, −59, −45, −27, 0, 11, 35, 37, 45, 49, 72], W = [−97, −91, −89, −63, −62, −58, −42, −38, −28, −8, 13, 14, 20, 29, 36, 77], D = [5], |
| | I1 = [−69, −68], |
| | I1 = [7, 8], I2 = [89, 90], L2 = [17~18, 30~31], L3 = [−51~−49], L4 = [−16~−13, 57~60], L12 = [78~86] |
| Struc59 | M = [−23, −6, 11, 21, 32, 60, 66, 89, 92, 96], W = [−24, −18, −5, −4, 10, 26, 27, 35, 37, 61, 65, 82, 83], I1 = [34, 35], L2 = [−17~−16, 42~43], L5 = [72~76] |
| Struc60 | M = [−98, −90, −88, −33, −26, −5, 0, 28, 31, 35, 37, 44, 68, 71, 76], W = [−93, −57, 12, 16, 22, 33, 42], D = [9], I1 = [−69, −68], I3 = [−57, −56], |
| | L1 = [−51~−50, −47~−45], L4 = [4~6, 59~63] |
| Struc61 | M = [−36, −14, −10, 0, 17, 21, 27, 39, 53, 59, 88, 96], W = [−61, −56, −55, −46, −42, −19, 3, 12, 13, 24, 28, 52, 71, 14], I1 = [4, 5], I10 = [43, 44], |
| | I1 = [98, 99], L2 = [−59~−58, −5~−4, 17~18], L3 = [29~30] |
| Struc62 | M = [−96, −70, −64, −31, 7, 26, 63, 70, 18, 90], W = [−98, −97, −52, −29, −4, 13, 61, 76, 81], I15 = [35, 36], I11 = [37, 38], L1 = [−10~−8], |
| | L2 = [−81~−80, −24~−23, −19~−18, 81~82], L3 = [−51~−49, −13~−13] |
| Struc63 | M = [−22, −15, 0, 20, 40, 45, 57, 70, 73], W = [−32, −27, −12, −11, 14, 32, 58, 68, 72], D = [8, 97], I1 = [2, 3], L2 = [−5~−4], L3 = [66~67], L12 = [86~91] |
| Struc64 | M = [−39, 0, 21, 26, 47], W = [−77, −65, −61, −55, −52, −48, −5, 5, 6, 7, 14, 18, 37, 38, 59, 67, 73, 75, 76], D = [−51, −50, −49, −4], I1 = [−63, −62], |
| | I1 = [82, 83], L2 = [−68~−67], L3 = [−58~−56, 11~13], L4 = [29~32], L6 = [−14~−10] |
| Struc65 | M = [−98, −58, −34, −24, −8, 26, 38], W = [−71, −59, −48, −43, −30, −12, 2, 14, 24, 31, 40, 41, 43], D = [−93, −92, −91, −21, −20, −17, −16, −4], |
| | I2 = [−83, −82], I3 = [−53, −52], I2 = [−30, −29], I12 = [16, 17], L2 = [−62~−61, 0~1, 5~6], L10 = [18~19] |
| Struc66 | M = [−41, −39, −18, −4, 0, 12, 20, 40, 48, 52, 57], W = [−99, −90, −85, −83, −82, −78, −77, −74, −19, −16, −11, −5, 8], D = [−87, −86], I2 = [−90, −89], |
| | L2 = [−32~−31], L5 = [−72~−71] |
| Struc67 | M = [−25, 9, 63, 74, 76, 85], W = [−27, −26, −23, −18, −17, −15, −14, 10, 12, 14, 24, 48, 50, 84], I8 = [−15, −14], L2 = [−21~−20, 82~83], L3 = [−10~−10] |
| Struc68 | M = [−15, 0, 24, 38, 43, 53, 84], W = [−23, −22, −18, −7, 7, 21, 27, 66, 72, 89], D = [29], I1 = [98, 99], L2 = [8~9], L3 = [30~32] |
| Struc69 | M = [−17, −6, 2, 7, 21, 26, 30, 51, 61, 76, 93], W = [−19, −18, −13, 3, 4, 25, 33, 35, 79], L1 = [36~38], L2 = [43~44, 67~68] |
| Struc70 | M = [−23, −17, 53, 67, 79], W = [7, 13, 21, 27, 40, 44, 68, 14, 76, 77, 82, 85, 87], D = [4], I1 = [2, 3], L9 = [30~38], L2 = [58~59] |
| Struc71 | M = [−5, 17, 20, 53, 95], W = [−10, −9, −4, 22, 48, 49, 54, 57, 14, 84, 96], D = [60, 69], I4 = [35, 36], I1 = [71, 72], L2 = [0~1, 63~64], L5 = [87~91], |
| | L15 = [38~39] |
| Struc72 | M = [12, 48, 58, 61, 65, 85], W = [−21, 3, 26], D = [27, 28, 29, 30], I1 = [−2, −1] |
| Struc73 | M = [−87, −83, −71, −62, −40, −29, −9, 0, 10, 19, 43, 55], W = [−86, −76, −75, −73, −69, −64, −63, −57, −36, −32, −22, 11, 18, 27, 32, 35, 59, 60, 71], |
| | I1 = [16, 17], I1 = [66, 67], I1 = [69, 70], I2 = [73, 14], I4 = [75, 76], L2 = [−59~−58, −55~−54, −14~−13, 21~23] |
| Struc74 | M = [26, 41, 49, 60, 77], W = [−7, −6, 5, 42, 51, 91], D = [7, 8, 9, 10, 11, 39], I1 = [−22, −21], I1 = [−20, −19], I4 = [−18, −17], I1 = [93, 94], |
| | L2 = [29~30, 98~99], L3 = [71~73], L6 = [32~37] |
| Struc75 | M = [−87, −64, −61, −48, −45, −30, 5, 12, 46, 54, 57], W = [−83, −49, −12, −3, 11, 17, 19, 30, 34, 51, 52], D = [40], I3 = [−95, −94], L3 = [−2~0] |
| Struc76 | M = [−23, −7, 3, 26, 47, 49, 54, 72, 84, 86, 95], W = [−6, 51, 66, 89], L1 = [36~37], L2 = [−18~−17], L3 = [57~59], L4 = [32~33] |
| Struc77 | M = [31, 59, 82, 88], W = [−23, −22, −21, −18, −17, −16, −15, −7, −6, 35, 38, 44, 53], L2 = [3~4, 26~27, 42~43, 71~72] |
| Struc78 | M = [−17, −9, 24, 32, 61, 68, 84], W = [−23, −7, 27, 40, 72, 73, 89], D = [38, 39], I1 = [−21, −20], L3 = [51~53] |
| Struc79 | M = [−33, −19, 0, 11, 31, 44, 46, 71, 97], W = [−59, −53, −10, −9, −2, 9, 13, 26, 85, 86], L1 = [37~38], L3 = [87~89] |
| Struc80 | M = [−18, −16, −10, 3, 7, 16, 26, 31, 35, 43, 46, 52, 56], W = [−4, 23, 24, 38, 53, 66, 74, 75, 86], I1 = [82, 83], L2 = [21~22], L3 = [−23~−22, 67~73], |
| | L4 = [77~80], L5 = [86~89] |
| Struc81 | M = [−24, 6, 18, 21, 26, 38, 53, 65, 73], W = [−16, −7, −6, 26, 68], I6 = [55, 56], L2 = [−19~−17, 30~31, 43~44, 60~61, 77~78], L3 = [93~95], L15 = [86~87] |
| Struc82 | M = [−85, −80, −71, −56, −43, −34, −16, −6, 0, 14, 20, 55, 72, 91], W = [−83, −81, 49, 51, 57, 65, 69, 70], I2 = [−31, −30], I2 = [48, 49], L1 = [25~25], |
| | L10 = [−21~−20], L3 = [−89~−87], L4 = [36~39] |
| Struc83 | M = [−18, 18, 38, 64, 77, 86], W = [−16, −7, −6, 42, 54, 68, 79], D = [−4], I6 = [55, 56], L2 = [−22~−21, 21~22, 30~31, 43~44, 60~61], L3 = [72~14, 93~95] |
| Struc84 | M = [−12, 1, 14, 19, 24, 61, 68, 87], W = [−29, −28, −25, −23, −22, −18, −13, 4, 23, 41, 65, 73, 80, 100], I15 = [79, 80], I13 = [80, 81], I2 = [84, 85], |
| | L2 = [−20~−19, 37~38, 90~91], L3 = [29~33] |
| Struc85 | M = [−5, 7, 49, 55, 57, 60, 90], W = [−7, −6, 5, 27, 30, 51, 52], I1 = [30, 31], L2 = [−22~−21, 64~65, 82~83], L3 = [71~73], L4 = [34~36] |
| Struc86 | M = [7, 20, 60, 62, 71, 88, 91, 95], W = [−10, −9, −4, −3, 22, 37, 48, 49, 57, 59, 74, 84, 96], I14 = [33, 34], I1 = [39, 40], L2 = [0~1, 53~54], L4 = [35~36] |
| Struc87 | M = [−65, −52, −34, −11, 0, 12, 16, 54, 81, 85], W = [−58, −51, −48, −5, 17, 38, 67], I5 = [−72, −71], L2 = [−50~−49, −27~−26], L6 = [32~37] |
| Struc88 | M = [−97, −56, −46, −37, −22, 0, 10, 31, 42, 55, 59, 65], W = [−28, −27, −9, −8, −5, −4, 36, 70], L1 = [23~24], L2 = [−60~−79, 34~35], L3 = [−74~−72] |
| Struc89 | M = [30, 53], W = [−19, −18, −6, 6, 21, 34, 43, 44, 55, 68], I10 = [32, 33], I1 = [74, 75], L2 = [−5~−4], L3 = [59~61], L5 = [69~72], L6 = [36~38] |
| Struc90 | M = [32, 0, 18, 25, 36, 40, 65, 75, 94], W = [−24, −18, −15, −10, 5, 10, 23, 47, 55, 56, 63, 68, 77, 78, 88, 93], D = [−44, −40, −34, −9], I1 = [−15, −14], |
| | I1 = [81, 82], L2 = [13~14], L4 = [−37~−37, 29~32], L5 = [49~53] |
| Struc91 | M = [−19, −17, −11, −6, 45, 47, 54, 85], W = [−23, −22, −7, 21, 26], L2 = [30~31, 35~36] |
| Struc92 | M = [−87, −76, −57, −37, −29, 0, 5, 25, 48, 62, 70], W = [−85, −74, −69, −65, −64, −33, −30, −23, 4, 6, 19, 29, 34, 36, 49], L2 = [−20~−19, 17~18], |
| | L3 = [−73~−71, −7~−5], L4 = [−15~−12] |
| Struc93 | M = [−92, −83, −74, −65, −40, −12, −7, 0, 17, 19, 23, 28, 43, 53], W = [−76, −64, −52, −51, −39, −38, −35, −23, −18, −13, −5, 2, 13, 15, 42, 54], |
| | D = [33], I1 = [47, 48], I5 = [49, 50], L3 = [4~6, 10~12] |
| Struc94 | M = [−96, −70, −65, −58, −51, −47, 54, 63, 71], W = [−98, −92, −83, −60, −52, −37, −28, −6, −4, 13, 14, 31, 51, 81, 100], D = [−31, −30, −29], I2 = [−39, −38], |
| | L1 = [78~80], L2 = [−82~−81, −19~−18, −10~−7, 3~4], L3 = [27~30, 74~75], L4 = [43~46] |
| Struc95 | M = [0, 7, 22, 30, 41, 49, 55, 60, 84, 91], W = [−15, 5, 21, 42, 75], L2 = [−19~−16, 26~27, 64~65], L4 = [35~37, 71~74] |
| Struc96 | M = [−92, −81, −72, −34, −31, −25, −12, −8, 0, 7, 44, 52, 85, 90], W = [−91, −79, −14, −30, 23, 24, 29, 37, 17, 86, 91, 94], D = [81], I1 = [28, 29], |
| | L1 = [−55~−55], L2 = [−29~−28, 46~47] |
| Struc97 | M = [−94, −84, −72, −42, −30, −27, −8, 0, 4, 26, 49, 58], W = [−86, −79, −64, −55, −52, −28, −19, −17, −12, 5, 35, 43], D = [36, 55], L2 = [−76~−75, 33~34] |
| Struc98 | M = [−91, −87, −36, −20, −12, 0, 6, 21, 31, 35], W = [−78, −76, −72, −28, −21, 4, 12, 17, 39, 52, 56], D = [−75, −74, −73, 50, 51], I1 = [−14, −13], |
| | I2 = [69, 70], L2 = [42~43, 45~45], L5 = [−84~−83], L6 = [−56~−51] |
| Struc99 | M = [−23, −19, 30, 54, 58, 61, 67, 83], W = [−22, −18, −4, 21, 22, 25, 38, 49, 68, 79, 84], L2 = [42~43, 74~75, 93~94] |
| Struc100 | M = [26, 56, 90], W = [−18, −9, −7, 22, 27, 36, 38, 53, 64, 66, 70, 76, 93], D = [42], I1 = [−24, −23], I1 = [44, 45], I5 = [68, 69], I2 = [82, 83], |
| | L2 = [−17~−16, 7~8, 74~75], L3 = [−22~−22], L6 = [30~35, 60~62] |
| Struc101 | M = [−98, −71, −55, −45, −40, −35, −5, 15, 19, 28, 34, 43, 66], W = [−97, −96, −80, −79, −64, −58, −10, 21, 37, 45, 49, 54, 70, 8, 92, 99], |
| | I6 = [36, 37], L1 = [23~24], L2 = [−63~−62, −21~−20, 71~72, 97~98], L3 = [−18~−16] |
| Struc102 | M = [−22, 23, 49, 59, 71, 85], W = [61, 66, 74, 92], I1 = [36, 37], I1 = [37, 38], L2 = [−6~−5, 25~26, 29~31] |
| Struc103 | M = [−10, 0, 3, 7, 17, 34, 49, 66, 97], W = [−24, −9, 25, 36, 37, 39, 52, 59, 85, 86, 91], I14 = [52, 53], L2 = [−5~−4, 72~74, 88~89], L6 = [−19~−14], |
| | L7 = [59~62] |
| Struc104 | M = [−64, −45, 22, 25, 35, 66], W = [−83, −80, −52, −51, −20, −12, −3, 7, 17, 34, 55, 62], I3 = [38, 39], L2 = [11~12, 28~29, 52~53], L3 = [−2~0, 55~56], |
| | L6 = [43~48] |
| Struc105 | M = [−80, −73, −68, −66, −62, −58, −33, −22, 1, 14, 25, 50, 55, 60, 62, 93], W = [−61, −51, −17, −15, −7, 18, 70, 71, 75, 87, D = [97], I3 = [33, 34], |
| | I3 = [36, 37], I1 = [38, 39], L3 = [−10~−8], L4 = [−37~−36] |
| Struc106 | M = [−6, 0, 36, 61, 92], W = [−18, 7, 13, 22, 29, 64, 65, 76], D = [68], I10 = [−21, −20], L2 = [30~31] |
| Struc107 | M = [9, 22, 26, 42, 59, 66, 71, 81, 97], W = [−18, 38, 43, 67], L2 = [75~76] |
| Struc108 | M = [−22, −10, 3, 7, 16, 22, 31, 35, 43, 58, 67, 71, 85], W = [−9, −4, 23, 27, 38, 54, 81, 89, 99], I10 = [89, 90], L2 = [−17~−16, 52~53, 76~77] |
| Struc109 | M = [−84, −65, −46, −32, −29, −13, 0, 5, 18, 21, 63], W = [−77, −61, −37, −26, 51], D = [−73, −70, −36], I2 = [−77, −76], L2 = [42~43] |
| Struc110 | M = [−19, −14, −8, 0, 4, 22, 42, 53, 57, 71, 78, 85, 87], W = [−22, −6, 27, 28, 43, 52, 69, 75, 98], D = [17, 31, 66, 92], I7 = [98, 99], L3 = [33~34, 36~38] |
| Struc111 | M = [−22, −18, 15, 54, 88], W = [−24, −15, 3, 27, 30], D = [42, 43], I1 = [−2, −1], L2 = [21~26, 57~58], L3 = [47~49, 73~75] |
| Struc112 | M = [−19, 22, 43, 53, 65], W = [−20, −5, 4, 37, 42, 56, 75, 77, 79, 90], I14 = [60, 61], I11 = [61, 62], I8 = [90, 91], L2 = [39~40, 80~81], |
| | L3 = [−9~−7, 69~71, 84~86, 95~98], L6 = [72~73], L7 = [26~32, 77~78] |
| Struc113 | M = [30, 44, 47, 67, 71, 74, 93], W = [−7, −5, −4, 3, 5, 8, 9, 26, 36, 38, 53, 54, 79, 84, 94], I2 = [−4, −3], L2 = [34~35, 61~62] |
| Struc114 | M = [−22, −19, −16, −9, 7, 26, 38, 44, 51, 59], W = [−17, −7, −6, 22, 39, 47, 50, 53, 66, 70, 14, 93], D = [28], I4 = [64, 65], I5 = [68, 69], I1 = [89, 90], |
| | L3 = [33~35], L4 = [82~84] |
| Struc115 | M = [−80, −71, −57, −51, −34, 0, 24, 52, 59, 72, 83, 54, 97], W = [−99, −94, −93, −83, −46, −38, −32, −31, −24, −11, 15, 35, 36, 39, 53], |
| | L2 = [−42~−39, 7~8, 47~48], L3 = [29~31] |
| Struc116 | M = [−23, 61, 82, 84], W = [−17, −7, 7, 22, 24, 34, 49, 50, 68, 73, 76], D = [90], I2 = [73, 14], I14 = [75, 77], L2 = [26~27, 35~36], L3 = [42~44] |
| Struc117 | M = [−17, −7, 16, 30, 49, 59, 86, 90, 94], W = [−21, 21, 22, 27, 29, 42, 48, 66, 69, 74, 75], I1 = [41, 42], I1 = [44, 45], I1 = [81, 82], |
| | L2 = [64~65, 71~72], L5 = [35~39] |
| Struc118 | M = [−86, −78, −70, −5, 0, 26, 35, 47, 72, 77, 81], W = [−62, −61, −56, −55, −44, −29, 12, 24, 32, 90, 95, 99], D = [−19, −18, −17, −16, −15, −14, −13], |
| | I9 = [92, 93], L2 = [−74~−74, −64~−63], L4 = [−41~−37], L7 = [38~89] |
| Struc119 | M = [−16, −7, 6, 14, 31, 41, 51, 79], W = [−23, −22, 68, 81, 62, 98], I1 = [37, 38], I1 = [68, 69], L2 = [−19~−18], L3 = [34~36] |
| Struc120 | M = [−19, −17, −11, 17, 24, 32, 35, 43, 84], W = [−23, −22, −7, 21, 27, 31, 34, 65, 72, 75, 76, 85, 89] |
| Struc121 | M = [7, 15, 51, 61, 68, 76], W = [−23, −22, −17, 21, 40, 53, 67, 73, 84], L1 = [29~30], L2 = [25~26, 35~38] |
| Struc122 | M = [39, 43, 66], W = [−24, −21, −5, 10, 34, 42, 61, 84, 85], D = [54], I1 = [52, 53], L1 = [89~98], L2 = [72~73, 82~83], L3 = [−8~−6], L5 = [29~33] |
| Struc123 | M = [21, 50, 65, 80], W = [−23, −22, −11, −6, 38, 42, 52], I1 = [−25, −24], I5 = [37, 38], L2 = [82~83], L3 = [−18~−16], L4 = [32~35] |
| Struc124 | M = [17, 30, 51, 54, 61, 67, 83, 86], W = [−19, −17, −7, −4, 21, 22, 49, 73, 79, 84], D = [42, 43], L2 = [26~27, 38~39, 75~76, 93~94] |
| Struc125 | M = [−90, −67, −31, −29, −9, −5, 0, 15, 32, 34, 46, 59], W = [−77, −74, −66, −24, −23, −12, −8, 6, 9, 22, 73, 76], D = [62], L1 = [−53~−49], L10 = [−80~−80], |
| | L3 = [70~72] |
| Struc126 | M = [−16, 20], W = [3, 33, 47], D = [34, 35, 36, 37], I1 = [−2, −1], L3 = [−23~−22, −6~−4] |
| Struc127 | M = [−11, −4, 6, 27, 54, 64], W = [−16, −9, 26, 28, 42, 46, 51, 97], I2 = [37, 38], L2 = [−19~−18, −7~−6] |
| Struc128 | M = [51, 54, 61, 66, 68], W = [−18, −5, 87], D = [−20, −8, 38, 39], I5 = [−25, −24], I5 = [89, 90], L3 = [−17~−17] |
| Struc129 | M = [9, 27, 36, 88, 97], W = [−23, −22, −19, −17, −16, 7, 35, 38, 53, 75, 76, 77], L2 = [30~31] |
| Struc130 | M = [−22, 4, 36, 38, 43, 79], W = [−21, 21, 30, 39, 54, 73, 82, 90], D = [−16, 86, 87], I1 = [−18, −17], L2 = [31~32] |
| Struc131 | M = [−6, 21, 27, 38, 48, 53, 58, 66], W = [−18, −3, 19, 41, 84, 85], D = [−24], I1 = [−20, −19] |
| Struc132 | M = [−6, 31, 49, 59, 80], W = [−16, 21, 66, 100], L2 = [−19~−18, 52~53, 71~72], L3 = [37~38] |
| Struc133 | M = [−12, 30, 40, 49, 53], W = [−23, −22, 4, 66, 84, 92, 99], L2 = [58~59], L3 = [−7~−5], L4 = [34~36] |
| Struc134 | M = [−19, −7, 26, 28, 30, 49, 52, 59, 61, 71], W = [−16, −9, 24, 66, 90], I2 = [36, 37] |
| Struc135 | M = [−21, −12, −9, 0, 9, 34, 73, 80, 83], W = [20, 48, 65, 72], I2 = [19, 20], L2 = [40~41], L3 = [59~61] |
| Struc136 | M = [21, 26, 54], W = [−23, 27, 82, 95], D = [−21, −19], I1 = [29, 30], L2 = [33~36], L3 = [−16~−16] |
| Struc137 | M = [−18, 16, 21, 30, 49, 56, 59, 65, 71, 80, 89], W = [−23, −16, 4, 51, 52, 66, 92, 99], I1 = [36, 37], L1 = [43~44], L2 = [26~27] |
| Struc138 | M = [−19, −16, −6, 25, 38, 83], W = [−23, 12, 21, 24, 29, 69, 70, 81], D = [32], L3 = [50~52] |
| Struc139 | M = [−50, −34, 0, 17, 58, 74], W = [−83, −78, −76, −71, −62, −29, −20, −19, 5, 8, 11, 13, 34, 51, 60, 72, 75, 78], D = [41, 42], I1 = [−94, −93], I2 = [45, 46], |
| | L2 = [−88~−87, −13~−12, −9~−8], L3 = [30~32], L4 = [−75~−72], L6 = [64~69] |
| Struc140 | M = [−63, −55, −48, −20, −18, 0, 15, 31, 36, 43, 48, 56, 61], W = [−86, −81, −80, −54, −50, −36, −28, −21, −11, −7, 4, 5, 17, 51, 55], |
| | D = [−84, −83, −33, −32, −31, 52], I3 = [−41, −40], L8 = [−15~−12], L2 = [−78~−74, −53~−52, 21~22], L3 = [63~65], L4 = [−70~−69] |
| Struc141 | M = [−58, −47, −41, −38, −28, 0, 29, 49], W = [−80, −27, −23, −20, −4, 12, 48], D = [−83, −78, −77, −76, −75, −14, −73, −72, −71, 40], L2 = [−90~−88, 21~22], |
| | L3 = [−52~−50], L4 = [44~47, 52~54], L6 = [−8~−7] |
| Struc142 | M = [−92, −74, −70, −24, −22, 0, 55, 63, 97], W = [−84, −58, −53, −34, 3, 45, 46, 51, 82, 98, 100], I1 = [−37, −36], I1 = [29, 30], I1 = [32, 33], I5 = [95, 95], |
| | L1 = [35~36], L2 = [−96~−95, −50~−49, 68~69, 77~78], L3 = [−81~−79, −10~−8], L4 = [−19~−16] |
| Struc143 | M = [−97, −89, −81, −73, −23, −15, 0, 17, 24, 28, 31, 45, 57, 70, 76, 90], W = [−99, −67, −60, −58, −51, −50, −24, −9, −8, −5, 22, 76, 79, 83], D = [40], |
| | I1 = [−66, −65], L2 = [−77~−76, 35~36, 53~54] |
| Struc144 | M = [−41, −37, −33, −17, 0, 8, 15, 29, 39, 46, 51], W = [−24, −21, 9, 13, 14, 28, 44, 52, 56, 62], D = [5, 58, 59, 60], L2 = [80~81], L3 = [91~93], |
| | L4 = [−25~−25, −10~−7] |
| Struc145 | M = [−33, −31, −20, 0, 5, 11, 31, 37, 47, 54, 82, 99], W = [−36, 7, 15, 16, 27, 50, 51, 59, 89, 98], D = [24, 25, 67], I1 = [70, 71], I1 = [92, 93] |
| Struc146 | M = [−83, −76, −54, −31, 0, 2, 13, 19, 51, 53, 70, 79, 84, 93, 99], W = [−81, −80, −52, −48, −44, −43, −36, −7, 10, 42, 52, 91, 95], D = [−6, 64], I1 = [9, 10], |
| | I14 = [24, 25], L1 = [73~74], L2 = [−92~−92, −21~−20, 40~41, 88~89], L3 = [−11~−10], L4 = [58~61], L5 = [32~36] |
| Struc147 | M = [−97, −93, −83, −61, −9, −7, 0, 4, 11, 24, 31, 34, 41, 44, 51, 56, 70, 75], W = [−96, −87, −56, −54, −53, −18, −12, −8, 13, 14, 15, 35, 57, 62, 68, 69, 91], D = |
| | [−72, −41, −40, −39, −25], I2 = [−65, −65], I1 = [−20, −19], I1 = [18, 19], I1 = [91, 92], L1 = [−47~−45, 85~87], L2 = [−79~−78, −75~−75, −56~−55, 36~37], |
| | L3 = [−89~−89, −33~−33] |
| Struc148 | M = [−84, −79, −74, −56, −48, −15, −11, 0, 4, 33, 48, 50, 58, 62], W = [−96, −77, −76, −55, −53, −51, −49, −47, −43, −41, −20, 17, 46, 71, 74, 91, 94], |
| | D = [−95, −94, −93, −40, 22], |
| | I1 = [−35, −35], I9 = [41, 42], I14 = [71, 72], I14 = [79, 80], I10 = [88, 89], I12 = [91, 92], I15 = [95, 96], I12 = [96, 97], L13 = [85~86], |
| | L2 = [−22~−21, 9~10], L3 = [−66~−64, 76~78], L5 = [−31~−27] |
| Struc149 | M = [−60, −50, −38, −22, 11, 28, 44, 49, 52, 56, 66, 84, 86, 96], W = [−65, −45, −40, −36, −31, −30, −12, 14, 33, 38, 40, 54, 63, 72, 73, 99], |
| | D = [−28, 0], I2 = [−75, −74], |
| | I15 = [−74, −73], I2 = [−72, −71], I1 = [3, 4], L1 = [35~37], L2 = [−58~−57, 8~9], L3 = [18~20, 59~61], L7 = [−80~−80], L8 = [−88~−84] |
| Struc150 | M = [−87, −76, −73, −54, −44, −41, −29, −22, 0, 14, 17, 59, 63, 84], W = [−68, −67, −49, −25, 8, 16, 19, 28, 32, 38, 57, 58, 69, 76, 99, 100], |
| | D = [10], I2 = [35, 36], |
| | I11 = [76, 77], L1 = [71~72], L2 = [−95~−94, −13~−12, 6~7], L4 = [89~92], L5 = [−8~−6], L10 = [40~42] |
| Struc151 | M = [−87, −71, −63, −44, −23, −21, −12, 0, 11, 19, 44, 48, 51], W = [−35, −34, −27, 20, 42, 62, 79, 80], L2 = [−39~−38, 22~23], L3 = [7~9], L5 = [40~41], |
| | L6 = [55~60] |
| Struc152 | M = [−95, −85, −71, −48, −20, 0, 2, 12, 32, 38], W = [−91, −61, −80, −72, −57, −56, −53, −46, −39, −26, −17, −14, 25], D = [8], L2 = [15~16], L3 = [−61~−59] |
| Struc153 | M = [−85, −72, −55, −52, −46, −37, −26, −15, −10, 0, 7, 11], W = [−87, −64, −63, −60, −33, −32, −27, −23, −22, −14, 17, 34, 39], D = [25, 26, 28], |
| | I1 = [30, 31], L2 = [−92~−91] |
| Struc154 | M = [−43, −18, 0, 7, 10, 25, 33, 36, 59, 93], W = [−50, −49, −34, −19, −14, −11, −10, −6, −4, 6, 8, 12, 14], I11 = [−39, −38], L1 = [67~69], |
| | L2 = [−54~−53, −22~−21, 29~30, 53~54], L7 = [−33~−31] |
| Struc155 | M = [−51, −43, −25, −22, −15, −7, 10, 12, 35, 46, 82, 92], W = [−57, −55, −23, −14, −13, 1, 13, 32, 34, 42, 48, 52, 69, 77, 85, 94], L2 = [−11~−10, 57~58, 70~71], |
| | L3 = [−37~−33, 65~67] |
| Struc156 | M = [−96, −90, −34, −20, 34, 39, 57, 61], W = [−98, −81, −25, 15, 66, 67, 95], D = [−62, −61, −60, −59, −58, −57, −56, −55, −54, −53, −52, −51], I1 = [−86, −85], |
| | I1 = [−12, −11], I2 = [50, 51], L1 = [−47~−41, −38~−36], L2 = [4~5], L3 = [29~31], L4 = [−80~−77] |
| Struc157 | M = [−35, −25, −22, −15, 10, 12, 35, 46, 53, 92], W = [−57, −55, −34, −23, 13, 32, 42, 52, 69, 85, 94], L1 = [76~77], L2 = [57~58, 70~71], |
| | L3 = [−43~−40, 65~67], L4 = [−11~−8] |
| Struc158 | M = [−82, −68, −53, −37, −19, 0, 7, 9, 24], W = [−81, −80, −77, −63, −57, −42, 31, 32, 44, 45], I1 = [−91, −90], I15 = [−80, −79], I2 = [3, 4], I7 = [51, 52], |
| | L2 = [−26~−25, −13~−12], L3 = [54~55], L4 = [−96~−93, −88~−85, −33~−30, −9~−6] |
| Struc159 | M = [−87, −83, −73, −13, 0, 10, 26, 50, 55, 75, 94], W = [−99, −86, −25, 9, 19, 28, 32, 39, 40, 71, 76], D = [−35, −34, 68, 69, 70], I13 = [62, 63], |
| | L2 = [−94~−93, −55~−54], L3 = [−30~−30], L4 = [−44~−41, 89~92], L13 = [−8~−7] |
| Struc160 | M = [−50, −36, −21, −7, 0, 3, 9, 31, 34, 37, 67, 83, 92, 97], W = [−28, −20, 50, 52, 71, 98, 99], D = [−45, −44, 26, 27, 28, 45, 46, 49], I1 = [−39, −38], |
| | L2 = [22~23, 56~57], L3 = [53~54], L6 = [87~90] |
| Struc161 | M = [−19, 0, 3, 11, 19, 37, 39, 46, 49, 68, 71, 96], W = [−9, −8, 12, 13, 20, 21, 28, 29, 83], I9 = [26, 27], L1 = [−27~−24], |
| | L2 = [−31~−30, −21~−21, 54~55, 60~61], L3 = [90~92] |
| Struc162 | M = [0, 5, 11, 47, 97], W = [−36, 13, 15, 24, 27, 40, 51, 68, 71, 89, 38], I6 = [−33, −32], I10 = [−28, −27], I15 = [−22, −21], L2 = [33~34, 57~58], |
| | L14 = [−20~−20] |
| Struc163 | M = [−96, 0, 7, 17, 26], W = [−97, −82, −81, −72, −57, −19, −17, −16, −5, 29, 33], D = [−8], I1 = [−85, −84], I4 = [32, 33], L2 = [−70~−69], L3 = [29~30], |
| | L4 = [−33~−31] |
| Struc164 | M = [−78, −75, −63, −21, −17, 0, 7, 12, 17, 47, 62, 75, 79, 86], W = [−59, −58, −5, 15, 59, 73, 82, 89], D = [−71, −70, −69, −36, −35, 40], I1 = [24, 25], |
| | I1 = [25, 26], L1 = [35~36], L2 = [−85~−84, 27~28], L3 = [−52~−50, −47~−45] |
| Struc165 | M = [−90, −79, −76, −57, −47, −44, −32, −25, −3, 11, 14, 56, 60, 81], W = [−71, −70, −52, −28, 5, 13, 16, 25, 29, 35, 54, 55, 66, 73, 96, 97, 98], |
| | D = [7], I2 = [32, 33], |
| | I11 = [73, 74], L1 = [68~69], L2 = [−98~−97, −16~−15, 3~4], L4 = [86~89], L5 = [−11~−9], L16 = [37~39] |
| Struc166 | M = [0, 3, 11, 16, 35, 51, 63, 66, 79, 89], W = [15, 56, 59, 65, 72], L2 = [85~86], L3 = [96~98] |
| Struc167 | M = [−60, −57, −19, −12, 0, 3, 13, 32, 35, 46, 80, 84, 94], W = [−83, −75, −71, −62, −59, −52, −16, 8, 26, 27, 69, 70, 79, 92], D = [−80, −79], I1 = [−54, −53], |
| | I1 = [96, 97], L1 = [−51~−50, −43~−42, −29~−28], L2 = [−95~−85, −35~−34, 53~54] |
| Struc168 | M = [−21, −11, −7, 0, 3, 5, 35, 39, 42, 47, 50, 67, 75, 85], W = [−99, −95, −87, −79, −61, −58, 2, 14, 18, 27, 37, 46, 53], D = [−42, 15], |
| | I9 = [−96, −95], I1 = [−93, −92], |
| | I14 = [−92, −91], I10 = [−87, −86], I12 = [−84, −83], I15 = [−80, −79], I5 = [−56, −55], I2 = [−30, −29], I1 = [51, 52], L1 = [54~55], |
| | L2 = [−78~−78, −69~−69, −60~−59, −19~−18, 31~32], L3 = [69~71], L4 = [−53~−50, −34~−34], L6 = [−66~−63] |
| Struc169 | M = [0, 5, 10, 25, 27, 35], W = [−52, −50, −49, 4, 12, 58, 64, 68], D = [72, 73, 74], I2 = [−44, −43], I3 = [−37, −36], L2 = [−32~−32, −22~−21, −19~−18, |
| | 53~54, 69~70], L10 = [−29~−29] |
| Struc170 | M = [0, 7, 74], W = [31, 45, 57, 65, 76, 78], D = [40, 41, 42, 43, 44], I3 = [36, 37], L2 = [11~12, 16~17] |
| Struc171 | M = [−94, −82, −61, −4, 0, 7, 17, 25, 44], W = [−95, −85, −81, −79, −24, −14, 4, 15], D = [−75, −34], I1 = [−78, −77], I1 = [4, 5], I2 = [28, 29], |
| | L2 = [−50~−49, −46~−45, −18~−17] |
| Struc172 | M = [−68, −65, −62, −47, 0, 3, 7, 9, 13, 24, 55], W = [−98, −90, −84, −75, −73, −56, −45, −44, −31, −8, 30, 57, 68, 83], I2 = [87, 88], I1 = [96, 97], |
| | L2 = [−81~−80, −51~−50, −30~−29, 51~52, 66~67, 79~82], L3 = [−96~−95, −87~−87, −59~−57, −26~−24, 17~19], L4 = [31~34] |
| Struc173 | M = [−5, 0, 6, 25, 35, 67, 80, 99], W = [−4, 2, 34, 39, 53, 98], I1 = [46, 47], L2 = [−10~−9, 31~32, 48~49], L3 = [54~57], L4 = [87~90] |
| Struc174 | M = [−73, −56, −53, −47, −31, −20, −7, 0], W = [−98, −54, −39, −38, −23, −11, 5, 26], I1 = [25, 26], L2 = [−93~−92, −45~−44], L3 = [9~11] |
| Struc175 | M = [−95, −81, −68, −58, −48, −38, −14, −8, 0, 7, 12, 17, 45, 72, 81], W = [−60, −59, −56, −24, 21, 36, 40, 50, 82, 84], I2 = [29, 30], I1 = [52, 53] |
| Struc176 | M = [−97, −95, −89, −79, −62, −54, −26, −17, −5, 0, 5, 11, 47, 51, 56, 65, 72, 76], W = [−86, −9, 27, 32, 33], D = [−46, 20, 21], L2 = [−60~−57], |
| | L3 = [−72~−72, −69~−68, −13~−11] |
| Struc177 | M = [−78, −75, −60, 0, 7, 17, 29, 40, 47, 62, 68, 72], W = [−73, −59, −58, −27, −26, −16, −5, −3, 28, 36, 44, 59, 77, 82, 89], D = [−71, −70, −69, −36, −35], |
| | L2 = [−51~−49, −45~−45, 75~76], L3 = [−84~−82, 12~14] |
| Struc178 | M = [−32, −7, 9, 34, 37, 48, 52, 67, 82, 88, 92, 97], W = [−20, −19, 10, 18, 19, 22, 26, 39, 47, 69, 71, 98], D = [0], I2 = [−35, −34], I3 = [90, 91], |
| | L1 = [−41~−39], L2 = [2~3, 27~31], L3 = [−22~−21], L4 = [−48~−48, 54~57] |
| Struc179 | M = [−35, −15, 7, 10, 12, 46, 76, 92], W = [−57, −55, −34, −23, −3, 1, 14, 32, 36, 42, 52, 69, 72, 7, 85, 94, 96], D = [−22, −9, −8, −7], I4 = [−19, −18], |
| | L1 = [−43~−42], L2 = [57~59, 70~71], L3 = [65~67] |
| Struc180 | M = [−69, −62, −24, 0, 2, 7, 17, 28, 36, 58, 72, 87], W = [−81, −79, −63, −21, −16, −5, 9, 13, 14, 31, 45, 48, 83, 89], L2 = [39~40, 84~85], L5 = [−43~−39] |
| Struc181 | M = [−57, −35, −16, 0, 5, 32, 35, 40, 49, 62], W = [−79, −77, −71, −45, −3, −22, −15, 27, 28, 29, 48, 70, 74, 81, 52], D = [94, 95, 96, 97, 98, 9], |
| | I3 = [−71, −10], I6 = [9, 10], |
| | I1 = [87, 88], L1 = [−30~−28, 78~80], L2 = [−76~−76, −40~−40, 83~84], L3 = [−9~−7, 21~23, 67~69], L7 = [−53~−53] |
| Struc182 | M = [−85, −81, −47, −38, −28, 6, 9, 34, 38, 61], W = [−89, −84, −83, −74, −68, −67, −4, −37, −21, −9, −8, 2, 12, 20, 27, 32, 51, 52, 59, 66], |
| | D = [−93, 14, 29, 30, 31], |
| | I1 = [−99, −98], I7 = [−96, −95], I2 = [−90, −89], I4 = [−63, −62], I1 = [10, 11], L1 = [−56~−53], L2 = [63~64] |
| Struc183 | M = [−28, −12, 0, 15, 27, 34, 93], W = [−48, −47, −21, −11, −9, 8, 32, 33, 36, 91, 92], I14 = [44, 45], I1 = [45, 46], L1 = [−8~−6], |
| | L2 = [12~13, 20~21, 72~73, 81~82], L3 = [37~39, 46~47, 59~61] |
| Struc184 | M = [−92, −89, −76, −64, −55, −48, −41, −8, 0, 46, 61, 74], W = [−77, −66, −57, −56, −28, −26, −25, −18, −17, 18, 28, 29, 62, 63], |
| | D = [15, 19, 20, 21, 22, 26], I1 = [−52, −51], L8 = [32~36], L1 = [5~6], L2 = [78~79], L3 = [−36~−34] |
| Struc185 | M = [−90, −86, −76, 16, −3, 7, 23, 47, 52, 72, 91], W = [−89, −28, 6, 16, 25, 29, 36, 37, 68, 73, 98], D = [−38, −37, 65, 66, 67], I13 = [59, 60], |
| | L2 = [−97~−96, −58~−57], L3 = [−33~−33], L4 = [−47~−44, 86~89], L13 = [−11~−10] |
| Struc186 | M = [−96, −44, −17, −5, 0, 3, 7, 35, 39, 58], W = [−81, −80, −60, −16, −3, 28, 57, 63], I2 = [27, 28], L2 = [−59~−58, 17~18], L3 = [86~88] |
| Struc187 | M = [−93, −89, −79, −75, −73, −68, −45, 4, 34, 81], W = [−72, −53, −6, 1, 13, 35, 45, 63], D = [−34, −33, −32, −31, −30, −23, 64, 65, 66, 67, 68, 69, 70, 71, |
| | 72, 73, 74, 75, 76], I1 = [18, 19], L1 = [56~61], L2 = [−56~−55, −19~−19, −11~−10, 36~37] |
| Struc188 | M = [−78, −44, −21, 0, 7, 27], W = [−96, −92, −46, −40, −22, −15, 21, 22, 24, 28, 30], D = [−12], I1 = [−97, −96], I2 = [−33, −32], I1 = [−18, −17], |
| | L2 = [−54~−53, 11~12], L4 = [22~23] |
| Struc189 | M = [−98, −86, −74, −71, −22, −16, 0, 7, 14, 17, 24], W = [−51, −37, −6, 11, 35, 36, 43, 62, 65, 66, 74], D = [−34, 57], I8 = [27, 28], I1 = [34, 35], |
| | I3 = [40, 41], I1 = [47, 48], |
| | I8 = [65, 66], I1 = [69, 70], I1 = [77, 78], I1 = [80, 81], I6 = [82, 83], I9 = [85, 86], L8 = [72~73], L2 = [−48~−47], L4 = [−84~−81], L5 = [31~32, 50~54] |
| Struc190 | M = [−77, −70, −48, −34, −5, 0, 6, 26], W = [−79, −78, −74, −65, −64, −49, −47, −45, −13, −11, 7, 15, 16, 21, 23, 24, 31, 41, 48, 53], I15 = [37, 38], I2 = [40, 41], |
| | I14 = [47, 48], I14 = [52, 53], I15 = [53, 54], I14 = [55, 56], I11 = [59, 60], I14 = [61, 62], I15 = [65, 66], I11 = [66, 67], I15 = [67, 68], I15 = [80, 81], |
| | I1 = [92, 93], L9 = [31~33], L2 = [−31~−30, −22~−21, −9~−8], L3 = [−96~−94, 11~13, 95~96], L4 = [56~57, 86~90] |
| Struc191 | M = [−44, −21, −17, 0, 11, 19, 26], W = [−92, −87, −82, −46, −40, −22, −13, 1, 2], D = [−54, −53, −52, −51, −50, −49, −46], I2 = [−33, −32], I5 = [22, 23] |
| Struc192 | M = [−87, −79, −49, −44, −8, 0, 2, 36, 56], W = [−97, −67, −58, −45, −41, −6, −5, 17, 19, 20, 34, 69, 80, 88], D = [−83, 43], I1 = [41, 42], |
| | L2 = [−69~−68, −50~−59, −47~−46, −40~−39, 6~7, 85~86], L3 = [−16~−14, 26~28, 62~64], L5 = [14~16] |
| Struc193 | M = [−76, −66, −54, −39, −19, −12, 0, 9, 38, 99], W = [−98, −96, −88, −81, −80, −48, −36, −20, −13, −7, 49, 50, 52, 53, 54, 64, 85], D = [−91, −90, −6, 31], |
| | I3 = [−96, −95], I1 = [−10, −9], I1 = [6, 7], I1 = [23, 24], L2 = [59~60, 73~74] |
| Struc194 | M = [−5, 0, 3, 11, 16, 35, 39, 53, 63, 79, 86, 89], W = [−3, 6, 32, 58, 59, 72], D = [97, 98], L2 = [43~44] |
| Struc195 | M = [−61, −46, −13, −8, 0, 17, 82, 84], W = [−90, −6, −5, 22, 36, 39, 40, 72], D = [−52, −51, −50, −34], I2 = [29, 30], L2 = [−64~−63, 6~7] |
| Struc196 | M = [−20, −10, 0, 7, 13, 16, 20, 30, 40, 48, 53, 60, 73, 79, 91, 99], W = [−25, −11, 31, 62, 63, 65, 69, 70, 85], I1 = [−15, −14], I2 = [83, 84], |
| | L8 = [−37~−30], L2 = [86~87] |
| Struc197 | M = [0, 3, 11, 16, 63, 81, 86, 95], W = [6, 40, 58, 59], I1 = [−4, −3], L2 = [34~35, 43~44, 50~51], L5 = [−5~−5] |
| Struc198 | M = [−69, −65, −46, −40, 0, 2, 7, 17, 26, 65, 72, 78, 81, 84], W = [−49, −41, −21, −5, 15, 29, 40, 45, 85, 89], D = [−53, −52, −51, −50], i2 = [−61, −60], |
| | I1 = [−60, −59], I2 = [29, 30], L2 = [48~49], L3 = [−27~−23, 52~54] |
| Struc199 | M = [−72, −68, −52, −9, −6, 29, 57, 72, 7, 8], W = [−82, −45, −24, −11, −18, −8, 1, 25, 31, 73, 84, 85], D = [6], I11 = [51, 52], L1 = [−35~−34, −23~−22], |
| | L2 = [−63~−62, −18~−18, 34~35], L3 = [−85~−83, −77~−75], L5 = [−96~−94], L6 = [37~42, 45~46] |
| Struc200 | M = [−78, −71, −59, −51, −17, −10, −7, 0, 6, 21, 37, 46, 52, 72, W = [−97, −74, −22, 13, 14, 33, 38, 75, 76], L1 = [−29~−23], L2 = [−93~−92, −64~−63, 28~29, 31~32], |
| | L5 = [78~79] |
| Struc201 | M = [−36, 16, 31, 55], W = [−55, −51, −44, −32, −31, −26, 9, 10, 27, 32], D = [−13, −12, 0, 36], I1 = [3, 4], I2 = [67, 68], L2 = [22~23, 27~28, 52~53], |
| | L3 = [−54~−52, −48~−48, −41~−40], L4 = [−20~−17, −8~−7], L5 = [60~64] |
| Struc202 | M = [−3, 26, 29, 34, 48, 71, 83], W = [−11, 9, 8, 27, 32, 42, 47, 52, 82, 84, 89, 91, 99, 100], L2 = [−7~−6, 74~75, 85~86, 95~96], L4 = [−36~−32, −23~−20] |
| Struc203 | M = [−88, −78, −66, −58, −56, −19, 24, 38, 43, 57, 65, 99], W = [−54, −22, −6, 1, 14, 37, 45, 58, 60, 70, 76, 94], D = [−40, −7], I1 = [−75, −74], I1 = [−11, −10], |
| | L1 = [−31~−28], L2 = [−71~−69, 11~12, 34~35] |
| Struc204 | M = [−83, −62, 0, 17, 21, 38], W = [−59, −52, −17, −6, −5], D = [−37, −36, −35], I2 = [28, 29], L2 = [7~8, 34~35], L4 = [−49~−46] |
| Struc205 | M = [−15, −8, 0, 16, 25, 33, 40], W = [−85, −70, −64, −54, −53, 60, 62], I6 = [−27, −26], L2 = [−57~−56, −18~−17, 3~4, 22~23], L3 = [44~45], L13 = [−81~−78], |
| | L15 = [−88~−87] |
| Struc206 | M = [−69, −58, −55, −42, −31, −9, −4, 0, 8, 13, 20, 53, 62, 84, 93], W = [−84, −82, −81, −70, −33, −20, 3, 6, 63, 72, 94], I2 = [−27, −26], I1 = [42, 43], |
| | L2 = [−80~−79, 27~28], L3 = [−14~−12] |
| Struc207 | M = [−64, −52, −19, 0, 11], W = [−80, −62, −56, −31, −29, −26, −25, −17, −9, 21, 22], D = [−83, −82, −68], L2 = [−22~−21, 24~25], L3 = [−89~−88, −39~−33], |
| | L7 = [−42~−42] |
| Struc208 | M = [−81, −74, −71, −47, −30, 0, 7, 17, 20, 45, 69], W = [−75, −65, −59, −51, −46, −6, 9, 28, 35, 41, 89], D = [−61, −60], I1 = [−13, −12], I2 = [28, 29], |
| | L2 = [81, 82], L2 = [−43~−39], L3 = [−67~−66], L4 = [84~86] |
| Struc209 | M = [−98, −88, −85, −70, −65, −7, 0, 4], W = [−66, −64, −58, −45, −29, −26, −24, 6], D = [−43, −35, 19, 20], L2 = [−68~−67] |
| Struc210 | M = [−4, 0, 3, 11, 16, 44, 79, 86, 89, 94, 98], W = [58, 72, 88], L6 = [61~66] |
| Struc211 | M = [−85, −70, −55, −6, 4, 23, 30, 39, 49, 72, 76, 78, 86, 90, 99], W = [−96, −95, −91, −78, −66, −63, −58, −57, −54, −44, −41, −38, −7, 28, 34, 58, 75, 82], |
| | D = [−31, −30, −29, −28], I4 = [−21, −40], I1 = [67, 68], L1 = [63~64], L2 = [−22~−21, 35−36, 52~53], L4 = [−47~−46] |
| Struc212 | M = [−96, −84, −71, −52, −48, −21, 32, 34, 52, 65, 97], W = [−83, −65, −59, −58, −43, −42, −38, 59, 60, 68], D = [6], L2 = [−91~−90], L3 = [−36~−34, 90~92], |
| | L5 = [−11~−11] |
| Struc213 | M = [−23, −20, −9, −6, 3, 5, 15, 27, 37, 80, 84, 91], W = [−10, 9, 10, 12, 19, 23, 24, 33, 44, 55, 69, 71, 93], D = [95], L2 = [76~77, 86~87], |
| | L3 = [−2~0, 41~43], L6 = [63~68] |
| Struc214 | M = [−69, −30, −6, 0, 2, 7, 17], W = [−97, −57, −50, −17, −16, −5, 39], D = [−90, −89, −88, −87, −86, −85, −84, −83, −82, −81, −80, −78], I1 = [−72, −71], |
| | I3 = [−50, −49], I2 = [28, 29], L1 = [−38~−36], L2 = [−9~−8] |
| Struc215 | M = [−94, −69, −55, −18, −4, 0, 7, 14, 17, 40, 45], W = [−82, −81, −62, −61, −37, 4, 35, 36], D = [−59], I1 = [−58, −57], I2 = [28, 29], L2 = [−50~−49, −45~−45] |
| Struc216 | M = [−6, 0, 6, 23, 36, 39, 43, 80, 87, 89, 96], W = [16, 37, 51, 71, 94, 97, 98], L4 = [57~60] |
| Struc217 | M = [−5, 0, 43, 65, 80], W = [−7, 5, 31, 57, 66, 76, 78], D = [32, 33, 35, 96], L2 = [11~12, 16~17] |
| Struc218 | M = [0, 7, 47, 49, 94], W = [−23, −22, −12, −9, 16, 17, 25, 33, 71, 100], D = [23, 24], L1 = [−6~−4], L3 = [37~39, 82~84], L5 = [−39~−34] |
| Struc219 | M = [−68, −49, −8, 0, 7, 17, 51, 59], W = [−77, −71, −61, −56, −46, −45, −16, −5, 1, 15, 28, 45, 83, 88, 89], I1 = [−46, −45], L1 = [−37~−36], |
| | L2 = [35~37, 39~40], L4 = [29~31] |
| Struc220 | M = [−93, −40, −33, 14, 46, 65], W = [−99, −96, −76, −75, −59, −55, −50, −39, −32, −19, −1, −6, 10, 26, 27, 47, 53, 7, 90], D = [−98, −97, −49, 31], I1 = [−84, −83], |
| | I5 = [−57, −56], I3 = [−27, −26], L1 = [−81~−80, −67~−62, 34~38, 41~44], L2 = [−74~−73, −23~−22, −9~−8, 60~61, 83~84], L3 = [−91~−88] |
| Struc221 | M = [−95, −91, −85, −57, −52, −30, −25, −19, −12, 0, 9, 24, 31], W = [−96, −94, −88, −82, −80, −75, −64, −62, −32, −8, −7, 41, 44, 60], D = [−43, −39, −38, −37], |
| | I2 = [−88, −87], I13 = [−63, −62], I9 = [−51, −50], I1 = [−32, −31], L1 = [−79~−76], L2 = [51~52], L3 = [−71~−68], L4 = [−47~−45] |
| Struc222 | M = [−97, −94, −91, −69, −53, −8, −4, 0, 2, 7, 17, 20, 44], W = [−82, −81, −62, −61, 4, 22], D = [−36, −35], I2 = [28, 29], |
| | L2 = [−50~−49, −46~−45, −18~−17, 39~40], L3 = [−60~−58] |
| Struc223 | M = [−78, −8, 0, 2, 7, 26, 35, 40, 44, 52, 63, 84, 86], W = [−70, −59, −52, −51, −47, −5, 20, 22, 89], D = [−38, −37, −36, −35], I2 = [28, 29], |
| | L2 = [−84~−83, −62~−61], L3 = [15~17] |
| Struc224 | M = [−94, −78, −54, −47, −44, −27, −25, −17, −3, 0, 11], W = [−92, −75, −40, −13, 2, 12], I2 = [−33, −32], L2 = [−21~−20], L3 = [22~24] |
| Struc225 | M = [−5, 0, 33, 44, 52], W = [−18, −9, 14, 20, 23, 37, 72, 89, 98], D = [−14, −13], L2 = [12~13, 25~26, 54~55] |
| Struc226 | M = [−92, −89, −76, −71, −8, 0, 34, 46, 61, 66], W = [−77, −18, −17, 28, 20, 33, 62, 63, 67], D = [26], I1 = [−41, −40], I4 = [36, 37], L1 = [−67~−64], |
| | L2 = [16~17, 78~79], L3 = [−52~−52, −36~−34], L4 = [−57~−56] |
| Struc227 | M = [−26, −19, 0, 4, 19], W = [−81, −76, −69, −68, −64, −58, −55, −33, −27, −9, 7], I13 = [−95, −94], I11 = [−78, −77], I14 = [−74, −73], I10 = [−73, −72], |
| | I8 = [−69, −68], I1 = [−65, −64], I2 = [−55, −54], I12 = [−52, −51], I15 = [−50, −49], |
| | I6 = [−48, −47], I7 = [−45, −44], I10 = [−40, −39], I5 = [−31, −30], I1 = [−9, −8], I1 = [8, 9], L3 = [−35~−34, 13~15], L1 = [−5~−3], L2 = [−92~−89], |
| | L10 = [−83~−83] |
| Struc228 | M = [−96, −91, −82, −43, −17, −14, −6, 7, 17, 47, 85], W = [−80, −66, −46, −45, −11, −5, −3, 14, 15, 35, 36, 37, 72, 73, 88], |
| | D = [−60, −59, −58, −37, −36, −35, −25], I2 = [28, 29], L2 = [−68~−67, 0~1, 25~26], L3 = [−55~−55], L5 = [−52~−50] |
| Struc229 | M = [−87, −77, −71, −64, 0, 16, 21, 29, 64], W = [−62, −55, −50, −17, −5, 15, 39, 45, 73, 82, 88, 89], D = [−4], L3 = [−39~−31] |
| Struc230 | M = [−89, −84, −81, −77, −74, −45, −35, −3, 5, 23, 36, 55, 69, 72], W = [−79, −71, −66, −26, 9, 59, 76], D = [−94, −29, −28, −27, 47], I1 = [−96, −95], |
| | I3 = [−62, −61], I1 = [49, 50], L2 = [−69~−68, −39~−38, 60~61] |
| Struc231 | M = [0, 7, 40, 43, 88], W = [−4, −2, 6, 16, 30, 55, 56, 78, 90, 97, 98], D = [66, 67, 68, 69, 70, 71, 72, 73, 74, 75, 76], I1 = [86, 87], L2 = [48~49, 93~94], |
| | L3 = [34~36] |
| Struc232 | M = [−16, 36, 67, 69, 87, 99], W = [−7, −6, 1, 9, 13, 37, 45, 46], D = [−11], I3 = [−9, −8] |
| Struc233 | M = [−94, −71, −44, −21, −15, 5, 33, 42, 47, 50, 67, 65], W = [−47, −10, 22, 24, 27, 37, 45, 58, 78, 92, 98], D = [−91, −90, −82, −81, −80, 36, 54, 75, 76], |
| | I1 = [−98, −97], I1 = [−97, −96], I13 = [−28, −27], I1 = [30, 31], I1 = [51, 52], I1 = [59, 60], |
| | L1 = [−68~−62], L2 = [−85~−84, −60~−59, −55~−52, −19~−18], L3 = [−9~−7, 69~71], L4 = [79~81], L5 = [−33~−33], L9 = [−76~−75], L10 = [−37~−37] |
| Struc234 | M = [−75, −23, −11, −8, 14, 35, 53, 57, 64, 70, 77, 83, 99], W = [−68, −51, −7, −6, 1, 13, 32, 36, 61, 74, 94], I2 = [−98, −97], L1 = [−32~−31], |
| | L2 = [−63~−62, −57~−56], L3 = [−85~−83, 38~40] |
| Struc235 | M = [−34, −32, −8, −6, 0, 11, 22, 81], W = [−48, −45, −42, 3, 27, 53, 93, 94], D = [−21, 54, 55, 56, 57, 58, 64, 65, 66], I1 = [−23, −22], L2 = [45~47], |
| | L15 = [−43~−43] |
| Struc236 | M = [−98, −95, −60, −37, −32, 7, 16, 24, 39, 53, 64], W = [−94, −83, −82, −79, −70, −68, −56, −42, −24, −22, 3, 4, 14, 36, 44, 50, 61, 71, 72, 78, 81], |
| | D = [−21, −3, 19], I1 = [−78, −77], I1 = [−20, −28], I1 = [14, 15], L2 = [−72~−71, −26~−25, 32~33, 82~83] |
| Struc237 | M = [−87, −73, −51, −33, −22, 0], W = [−99, −88, −52], D = [−11, −10, −9], I12 = [−65, −64], I1 = [−55, −54], L1 = [−6~−5], L2 = [−93~−92, −57~−56, 3~4], |
| | L3 = [−47~−44] |
| Struc238 | M = [−31, 0, 5, 19, 47, 64, 70], W = [−29, −4, 7, 21, 46, 61], I2 = [−24, −23], L2 = [38~39], L3 = [−7~−6, 13~15], L6 = [−19~−14] |
| Struc239 | M = [0, 24, 29, 52, 56, 61, 68, 71], W = [14, 15, 30, 31, 36, 57, 63, 65, 76, 78], D = [79, 80, 81, 82, 83, 84, 85, 86, 87], L2 = [11~12, 16~17], L4 = [37~43] |
| Struc240 | M = [0, 33, 50, 93, 97], W = [−33, −27, −10, −9, −6, 2, 21, 53, 91, 95, 96], L2 = [43~44, 80~81], L3 = [5~6] |
| Struc241 | M = [−81, −68, −50, −23, −8, 0, 7, 17, 26, 47, 62, 82, 85], W = [−99, −84, −66, −57, −46, −35, −5, 14, 30, 35, 36, 37, 39, 72, 73], D = [−79, −34, −14], |
| | I1 = [−59, −58], I1 = [−18, −17], I2 = [28, 29] |
| Struc242 | M = [−50, −44, 0, 11, 22, 73], W = [−43, −14, −13, −5, 3, 4, 27, 49, 53, 55], D = [36, 56, 57, 58, 59, 60, 61, 62, 63], L2 = [−35~−34, −24~−23, 46~47], L6 = [−8~−6] |
| Struc243 | M = [−91, −88, −85, −70, −65, −60, −14, −7], W = [−78, −64, −55, −54, −42, −29, −26, −25, −9, 6], D = [21, 22], I1 = [3, 4], L1 = [7~8], L2 = [−68~−67], L3 = [−2~0], |
| | L5 = [−40~−40] |
| Struc244 | M = [−94, −90, −87, −69, −48, −18, −14, 0, 3, 7, 17, 23], W = [−62, −61, −16, −13, 4], I2 = [28, 29], L2 = [39~40], L3 = [−60~−58], L4 = [−7~−4], L14 = [−33~−31] |
| Struc245 | M = [−96, −92, −89, −68, −65, −51, −17, −7, 0, 7, 17, 20, 31, 35, 39, 47, 55], W = [−94, −61, −60, −56, −48, −46, −5, 15, 28, 45, 61], D = [−39], L2 = [28, 29], |
| | I2 = [82, 83], L2 = [−80~−79, −59~−58], L3 = [−45~−44], L4 = [84~85] |
| Struc246 | M = [−81, −78, −69, −66, −57, 24, 26, 35, 57, 69, 81, 94], W = [−71, −54, −22, −18, −10, −7, −6, 14, 22, 36, 46, 58, 76, 78, 100], I5 = [−41, −40], |
| | L2 = [−9~−8, 37~38, 53~54], L3 = [−88~−86], L4 = [−34~−28] |
| Struc247 | M = [−83, −59, −54, −30, −21, 0, 11], W = [−76, −72, −68, −66, −62, −31, −29, −9, 21], D = [−78], I4 = [21, 22], L3 = [−89~−87], L4 = [−39~−38], L7 = [−42~−42] |
| Struc248 | M = [−84, −60, −49, −37, −21, 17, 24, 39, 53, 61, 64], W = [−58, −56, −42, 3, 4, 5, 8, 18, 27, 36, 45, 72, 73, 78, 79, 81, 91, 95], |
| | D = [−34, −33, −32, −31, −30, −29, −3], L2 = [−78~−78, 82~83], L3 = [32~34] |
| Struc249 | M = [−90, −69, −60, −55, −17, −8, 0, 7, 56, 64, 88], W = [−82, −81, −58, −57, −45, 36, 44, 61, 85], D = [−34, 81], I2 = [29, 30], I8 = [73, 14], I13 = [84, 85], |
| | L2 = [−6~−5, 39~40], L3 = [15~17], L15 = [75~76] |
| Struc250 | M = [25, 52, 67, 87, 97], W = [2, 34, 35, 37, 39, 44, 49], L2 = [47~48, 55~56], L3 = [−2~0] |
| Struc251 | M = [−91, −75, −11, 8, 13, 36, 43, 62, 77, 90, 94], W = [−73, −20, 1, 25, 30, 34, 35, 45, 61, 76], |
| | D = [−66, −65, −64, −63, −62, −61, −60, −59, −58, −57, −56, −55, −54, −52, −51, −50, −49, −48, −47, −46, −45, −44, −43, −42, 53, 54, 55, 56, 57, 58], I2 = [−87, −86], |
| | I1 = [−29, −28], I1 = [−21, −20], L3 = [82~84], L10 = [−15~−14], L2 = [−9~−8] |
| Struc252 | M = [−89, −79, −75, −64, −45, −9, 34, 56, 75, 81], W = [−87, −86, −74, −72, −8, 1, 13, 14, 15, 45, 68], D = [−35, −34, −33, −32, −31, −30, −23, 98], I1 = [−20, −19], |
| | I1 = [18, 19], L2 = [−56~−55, −7~−6, 36~37, 60~61], L3 = [−95~−93] |
| Struc253 | M = [−42, −37, −34, −29, 0, 9, 26, 28, 33, 71, 84, 97], W = [−52, −39, −38, 1, 13, 14, 15, 16, 49, 83, 88], D = [67], I6 = [39, 40], I3 = [64, 65], |
| | L2 = [−24~−23, −20~−20, −13~−12, 42~43], L3 = [89~91] |
| Struc254 | M = [−91, −87, −77, −56, −34, −17, −6, 0, 3, 21, 44], W = [−89, −67, −58, −15, 34, 35, 37, 42], D = [−72, −71, −13], I1 = [−42, −41], I11 = [−26, −25], I3 = [−20, −19], |
| | I15 = [−10, −9], I1 = [−9, −8], L2 = [39~40], L3 = [−65~−65], L4 = [−24~−24] |
| Struc255 | M = [−52, −43, −37, −24, −9, −7, 0, 8, 19, 52, 81], W = [−53, −51, −45, −40, −27, −26, −21, −18, −10, 20, 38, 48, 58, 63, 64, 76, 89, 98, 99], D = [−13], L1 = [32~35], |
| | L2 = [28~29, 96~97], L3 = [24~46], L4 = [39~40] |
| Struc256 | M = [−92, −89, −66, −61, −58, −44, 0, 27, 45, 48, 58, 68, 96], W = [−93, −90, −87, −84, −70, −67, −37, −27, 3, 4, 8, 19, 51, 61, 62, 64, 74, 84], D = [−26, −3, 15, 16], |
| | L1 = [−20~−19], L2 = [−81~−80, −52~−51], L3 = [−75~−73, −14~−13, 21~22, 52~54, 77~79], L5 = [−34~−31], L6 = [89~90], L7 = [98~99] |
| Struc257 | M = [−93, −89, −22, 25, 44, 81], W = [−87, −72, −53, −20, −18, 1, 16, 37, 68, 77], D = [−34, −33, −32, −31, −30], I1 = [−7, −6], I1 = [18, 19], L1 = [−11~−9, 98~99], |
| | L2 = [−80~−79, −56~−55, 50~51, 56~57], L3 = [−77~−75, −46~−44, 34~36, 74~76] |
| Struc258 | M = [−7, 35, 54, 72, 85, 87, 93], W = [−24, −16, −12, 1, 4, 10, 21, 30, 44, 66], D = [37, 38, 39, 40, 41, 42, 43], L2 = [82~83] |
| Struc259 | M = [−84, −69, −18, −4, 0, 7, 14, 17], W = [−82, −81, −62, −61, −32, −16, 4], D = [−34], I2 = [28, 29], L1 = [−60~−56], L2 = [39~40], L6 = [−94~−90, −50~−45] |
| Struc260 | M = [−42, −15, 0, 16, 27, 44, 68, 74, 80, 91], W = [−47, −31, −30, −16, −8, −7, 4, 19, 55, 59, 69, 75, 76, 79, 82, 85], L2 = [−34~−33], L3 = [−72~−70, 35~38], |
| | L12 = [−66~−58] |
| Struc261 | M = [−57, −55, −45, 0, 10, 17, 20, 29, 49, 60, 97], W = [−90, −83, −78, −75, −65, −62, −42, −25, 3, 5, 31, 32, 42, 48, 55, 76, 100], |
| | D = [77, 78, 79, 80, 81, 82, 83, 84, 85], I5 = [−35, −34], L2 = [39~40] |
| Struc262 | M = [−92, −72, −50, −35, −22, 6, 40, 50, 80, 82, 91], W = [−57, −55, −15, −9, 16, 39, 48, 53, 54, 68, 69, 85, 86], L2 = [−24~−42, −30~−29] |
| Struc263 | M = [−89, 0, 6, 15, 17, 23, 34, 47, 49, 75], W = [−83, −62, −53, −13, −11, 5, 31, 40, 42, 55, 59, 63, 64, 65, 73, 74, 77, 89], I1 = [−46, −45], I2 = [31, 32], |
| | I9 = [57, 58], I6 = [64, 65], I11 = [70, 71], I15 = [91, 92], I1 = [93, 94], L11 = [96~98], L2 = [−58~−57, −55~−54, −42~−40, 60~61], L3 = [−79~−77, 77~78, 83~85] |
| Struc264 | M = [−16, −9, 0, 16, 24, 47, 66, 90, 96], W = [−21, 6, 38, 39, 41, 57, 65, 82, 86], D = [29, 69], I2 = [80, 81], L1 = [72~73], L2 = [−5~−4, 32~33] |
| Struc265 | M = [−21, −14, −4, 0, 54, 63, 68], W = [−17, −16, −12, 30, 40, 48, 67, 85, 86], I1 = [6, 7], I15 = [31, 32], I14 = [32, 33], I11 = [36, 37], I14 = [40, 41], |
| | I15 = [41, 42], L5 = [21~22] |
| Struc266 | M = [−91, −70, −67, −53, −40, −5, 0, 42, 51], W = [−94, −83, −80, −77, −71, −48, −41, −17, −16, −8, −3, 3, 26, 53, 59, 66, 83, 84], D = [65], I12 = [22, 23], |
| | I1 = [90, 91], |
| | I2 = [92, 93], L2 = [−57~−56, −52~−49, 54~55], L3 = [−63~−60, 60~62, 95~97], L4 = [85~86], L5 = [−26~−24], L8 = [15~17] |
| Struc267 | M = [0, 3, 6, 19, 45, 48, 67, 90], W = [−17, −12, −11, −5, 2, 15, 16, 22, 40, 56], I10 = [33, 34], I2 = [42, 43], I1 = [72, 73], I2 = [14, 75], L2 = [23~24, 77~78], |
| | L3 = [−16~−14, 36~38] |
| Struc268 | M = [−95, −92, −45, −12, 0, 4, 12, 22, 25, 28, 50, 63, 67, 71, 88], W = [−74, 69, −66, −63, −44, −27, −6, −5, 27, 40, 41, 46, 49, 72, 77, 83, 86, 89], |
| | D = [−88, −87, −86, −85, −84, −83, −82, −81, −80, −79, −78, −77, −76, −75, −72, −62, −61, −56, −55, −54, −53, 33], L2 = [−68~−67, −41~−40, 35~36, 93~94], |
| | L3 = [−22~−21] |
| Struc269 | M = [−15, 0, 9, 21, 24, 55, 69, 74], W = [−17, 10, 37, 38, 61, 79], L2 = [13~14, 45~46], L5 = [28~32] |
| Struc270 | M = [−20, −18, 0, 32, 14, 83, 99], W = [−10, 6, 19, 33, 50, 66, 78, 79, 92], D = [40, 41, 93, 94], I1 = [7, 8], I1 = [84, 85], L3 = [−15~−13, 85~87] |
| Struc271 | M = [−15, −4, 0, 3, 20, 52, 56, 63, 87, 89], W = [−7, 23, 33, 40, 81, 94], D = [69], I1 = [72, 73], L2 = [−21~−20], L3 = [46~48, 76~78], L5 = [28~32] |
| Struc272 | M = [−19, −17, −15, −5, 0, 12, 33, 46, 58, 62], W = [−4, 9, 14, 27, 30, 96], I2 = [78, 79], L2 = [−12~−11, 86~87] |
| Struc273 | M = [−83, −75, −46, −22, −17, 0, 5, 15], W = [−77, −67, −64, −56, −53, −35, 32, 35, 41], D = [−55, −54], I1 = [−39, −38], I9 = [26, 27], I14 = [27, 28], I9 = [30, 31], |
| | I14 = [32, 33], L1 = [−43~−42], L2 = [−6~−5], L4 = [−61~−60] |
| Struc274 | M = [−14, 0, 21, 24, 38, 40, 45, 56, 83], W = [−9, −5, 20, 29, 46, 74, 75, 77, 95], I1 = [93, 94], L2 = [6~7] |
| Struc275 | M = [−23, 0, 7, 28, 53, 87], W = [−26, −24, −20, −15, −14, 21, 29, 49, 55], D = [25, 40, 41], I1 = [18, 19], L1 = [−19~−16], L2 = [−5~−4, 62~63] |
| Struc276 | M = [−77, −70, −60, −55, −8, 0, 6, 12, 20, 24, 56, 71, 92], W = [−88, −84, −82, −71, −48, −47, −22, −15, 2, 25, 61, 63], D = [89], I1 = [83, 84], |
| | L2 = [16~17, 47~48, 68~69], L3 = [−87~−85, −25~−23, 77~79] |
| Struc277 | M = [0, 29, 72, 87, 91], W = [−15, −9, −8, −7, −5, 18, 45, 82, 85], L1 = [48~49], L2 = [−12~−11, 43~44, 54~61], L3 = [10~12, 98~99] |
| Struc278 | M = [−19, −14, 0, 6, 37, 60, 64, 68, 71, 94], W = [−22, −20, −5, −4, 23, 24, 26, 28, 29, 40, 87, 91], L2 = [32~33] |
| Struc279 | M = [0, 7, 61, 87, 91], W = [−18, 17, 23, 32, 33, 36], D = [−22, −6], I4 = [−18, −17], I1 = [−5, −4], I1 = [31, 32], L1 = [28~29], L2 = [84~85], L3 = [14~76] |
| Struc280 | M = [−80, −74, −66, −57, −54, −51, −40, −23, 0, 20, 24, 37, 67, 72, 78], W = [−89, −59, −45, −22, −21, −20, −4, 6, 7, 15, 17, 52, 59, 68, 98], D = [34, 54], |
| | I1 = [6, 7], I1 = [51, 52], L2 = [−17~−16, −7~−6, 43~44], L3 = [−33~−32], L5 = [26~30] |
| Struc281 | M = [−86, −82, −78, −74, −52, −45, 0, 49], W = [−73, −72, −69, −41, −40, −17, −16, −10, −8, 5, 23, 36, 46, 48, 58, 65], D = [−95, −37, −36, −35, −34, −33, −32], |
| | L2 = [−50~−49, 29~30, 51~52], L4 = [−90~−89] |
| Struc282 | M = [−92, −83, −64, −61, −54, −19, −17, −7, 23, 26, 38, 50, 60, 68, 81], W = [−79, −75, −55, −40, −15, −9, −6, 6, 13, 37, 43], D = [−89, −88, −76, 29, 30, 31, 32, |
| | 73, 74], I1 = [−94, −93], I1 = [5, 6], L2 = [−71~−71], L3 = [−22~−22] |
| Struc283 | M = [−84, −77, −67, −44, 0, 5, 12, 21, 25, 50, 59, 62, 14], W = [−90, −58, −57, −43, 37, 39, 42, 84], D = [−23], I2 = [32, 33], L1 = [−38~−37], |
| | L2 = [53~54, 85~86, 91~92], L3 = [−50~−48, 45~47] |
| Struc284 | M = [12, 29, 64, 66, 83, 86, 89, 94], W = [22, 35, 68, 82, 95], D = [−4], I5 = [16, 17], I1 = [91, 92], L1 = [77~78], L2 = [31~32, 37~38], L3 = [59~61] |
| Struc285 | M = [−11, 0, 10, 29, 32, 70, 75, 81], W = [6, 15, 16, 19, 30, 42, 56, 92], D = [93, 94], I1 = [83, 84], L2 = [40~41], L3 = [85~87], L6 = [−18~−13] |
| Struc286 | M = [−87, −85, −79, −76, −59, −54, −47, −35, −25, −23, −19, −15, 0, 8, 19, 34, 43, 58, 63], W = [−92, −80, −37, −28, −12, −11, −7, 24, 35, 54, 70, 71, 72, 74, 88], |
| | L2 = [65~66, 79~80], L5 = [−70~−66] |
| Struc287 | M = [−86, −82, −77, −71, −39, −32, −24, 0, 8, 10, 20, 24, 78, 88, 94], W = [−93, −58, −57, −46, −45, −14, −13, 17, 41, 45, 61, 80, 90], D = [31, 32], |
| | L2 = [−65~−64, −55~−54, 70~12], L4 = [74~75] |
| Struc288 | M = [−71, −65, −42, −39, −35, −31, −24, −20, 0, 30, 38, 49, 72, 17, 80], W = [−96, −94, −70, −66, −49, −48, −29, −9, −7, −6, −5], I1 = [−97, −96], |
| | L2 = [−89~−88, −18~−18, −16~−15], L3 = [83~85], L5 = [−59~−55] |
| Struc289 | M = [0, 97], W = [−24, −9, −8, −6, −5, 3, 13, 15, 35, 40, 49, 55, 60, 51, 75, 78, 94], D = [−23, −10], I1 = [41, 42], I7 = [56, 57], I1 = [63, 64], I5 = [86, 87], |
| | I3 = [94, 95], L1 = [23~29], L2 = [−18~−18], L3 = [69~71] |
| Struc290 | M = [−96, −68, −65, −59, −55, −42, −35, −22, −4, 0, 8, 28, 33, 35, 40, 68, 86], W = [−99, −89, −71, −67, −62, −46, −45, −10, −6, −5, 13, 39, 41, 49, 66, 87, 93], |
| | L1 = [72−78], L2 = [−91~−90, −82~−81, −51~−50, 3~4, 17~18, 45~46], L4 = [58~61] |
| Struc291 | M = [−16, −7, 0, 28, 47, 51, 61, 63, 91], W = [49, 54, 66], I2 = [39, 40], L4 = [30~33] |
| Struc292 | M = [−20, −4, 0, 28, 30, 60, 63, 68, 86], W = [−17, −16, 32, 49, 94], D = [40, 41], L3 = [53~55] |
| Struc293 | M = [0, 23, 69, 71, 83], W = [−16, 6, 24, 37, 38, 40, 70], L2 = [−15~−14, −5~−4], L3 = [28~30, 44~46] |
| Struc294 | M = [−82, −64, −32, −24, −5, 8, 23, 78], W = [−93, −58, −57, −46, −14, −10, 17, 41, 76, 90], I1 = [42, 43], I1 = [46, 47], L1 = [33~35], |
| | L2 = [−78~−77, −55~−54, −42~−41, 44~45, 55~56, 93~94] |
| Struc295 | M = [−81, −71, −66, −64, −13, 0, 12, 40, 44, 88, 98], W = [−95, −48, −30, −21, −17, 15, 37, 54, 59, 71, 77, 78, 79, 84], D = [−94, −93], I11 = [−28, −27], |
| | L2 = [3~4], L3 = [−8~−6] |
| Struc296 | M = [−18, 0, 61], W = [−20, −5, −4, 27, 29, 31, 48, 87], D = [24, 25, 95], L1 = [81~82], L2 = [−15~−14, 32~33, 67~68], L4 = [37~40], L6 = [71~76] |
| Struc297 | M = [−90, −82, −79, −57, −55, 0, 12, 18, 38, 42, 47, 64, 96], W = [−94, −63, −61, −59, −19, −13, 9, 11, 13, 85], D = [−45, 69, 70, 71, 72, 73], I1 = [−43, −42], |
| | I2 = [31, 32], L2 = [−16~−14, 92~93], L3 = [−66~−64, −27~−25] |
| Struc298 | M = [−65, −27, −10, −5, 0, 4, 13, 17, 21, 32, 44, 67, 72], W = [−93, −92, −75, −57, −46, −45, 8, 28, 36, 55, 79, 81, 83, 84], I4 = [35, 36], L2 = [−78~−77, −13~−12] |
| Struc299 | M = [−7, −74, −65, −27, −5, 0, 13, 4, 53, 78], W = [−93, −92, −98, −57, −56, −54, −53, −46, −45, 5, 8, 17, 18, 28, 56, 57, 79, 81, 83, 84], D = [−12], I1 = [−10, −9], |
| | I2 = [32, 33], I4 = [41, 42], L2 = [71~72] |
| Struc300 | M = [−95, −90, −82, −68, −61, −55, −36, −31, −26, 0, 8, 21, 23], W = [−81, −79, −74, −67, −60, −39, −37, −23, −8, 4, 15, 16], D = [−76, −51], L2 = [−45~−44] |
| Struc301 | M = [−5, 0, 40, 50, 71], W = [−9, 24, 28, 32, 33, 75, 76, 87], D = [−17], I1 = [−21, −20], L3 = [−14~−12] |
| Struc302 | M = [−91, −83, −65, −62, −52, −44, −41, −32, −22, −18, 0, 5, 6, 41, 95], W = [−87, −78, −50, −49, −36, −35, −33, −10, 31, 32, 45, 51, 66, 71, 76, 78, 82, 92], |
| | I1 = [21, 22], L1 = [67~68], L2 = [−89~−88, −77~−76], L3 = [27~29], L15 = [−28~−28] |
| Struc303 | M = [−7, 0, 11, 21, 28, 56, 69], W = [−9, −5, −4, 9, 29, 32, 66, 74], L2 = [47~48], L4 = [−17~−14] |
| Struc304 | M = [−79, −60, −43, −41, −26, −13, 10, 17, 20, 63, 87], W = [−94, −73, −67, −64, −48, −47, −5, 3, 40, 41, 59, 66, 95], D = [32, 33], L2 = [44~45, 91~92], |
| | L3 = [0~2], L6 = [88~89] |
| Struc305 | M = [0, 11, 15, 24, 32, 46, 53, 63, 67], W = [21, 28, 37, 43, 60, 69, 75, 81, 89], D = [−4], I1 = [−7, −6], I7 = [86, 87], L1 = [38~40], L2 = [19~20, 70~71], |
| | L4 = [76~79, 89~91] |
| Struc306 | M = [−20, −4, 0, 9, 24, 29, 53, 63, 66, 70], W = [−21, −19, 32, 55], D = [−16, 40, 41], I1 = [−15, −14], L2 = [75~76] |
| Struc307 | M = [−91, −87, −70, −68, −48, −37, −27, −25, 0, 20, 43, 71, 79, 93, 95], W = [−84, −45, 8, 16, 58, 75], D = [−78, −18, 62, 63], I1 = [−81, −80], L1 = [−6~−5], |
| | L2 = [34~35], L3 = [−15~−15] |
| Struc308 | M = [−94, −61, −50, −40, −5, 0, 36, 45, 62, 82, 88], W = [−99, −93, −78, −67, −58, −47, −46, −13, −10, −6, −3, 34, 86], I1 = [−34, −33], I1 = [31, 32], I1 = [37, 38], |
| | L2 = [−98~−97, −77~−76, −55~−54, 39~40, 72~73] |
| Struc309 | M = [−13, −4, 0, 8, 32, 45], W = [−21, −20, −17, −5, 6, 9, 10, 25, 33, 37, 38, 49, 81, 86], L2 = [41~42], L3 = [73~75], L4 = [21~24, 53~56, 77~80] |
| Struc310 | M = [−90, −79, −76, −66, −63, −38, −21, −16, 0, 31, 79, 95], W = [−49, −47, 6, 9, 11, 34, 38, 48, 65], I4 = [−99, −98], I2 = [−93, −92], I1 = [−47, −46], |
| | I3 = [−28, −27], L2 = [71~72], L3 = [−9~−7] |
| Struc311 | M = [−96, −58, 0, 3, 30, 54, 59, 72, 87, 92, 95], W = [−91, −14, −3, 17, 79, 88, 93], D = [−29, 47, 48], I8 = [−37, −36], I1 = [52, 53], L2 = [−50~−49, −8~−7, |
| | 77~78], L3 = [−17~−15] |
| Struc312 | M = [−76, −69, −63, −47, −35, 0, 3, 6, 22, 46, 62, 97], W = [−91, −86, −84, −78, −66, −61, −48, −46, −44, −41, −38, −27, −12, −11, −10, 26, 47, 70, 78, 79, 91], |
| | D = [−25, −24, −23, −22, −21, −20, −19, −18, −17, −16], I7 = [−99, −98], I1 = [39, 40], L2 = [24~25, 73~74] |
| Struc313 | M = [−88, −85, −80, −36, 6, 17], W = [−82, −69, −45, −25, −6, 1], L2 = [−42~−39, −28~−27], L3 = [−62~−60, −54~−52] |
| Struc314 | M = [0, 9, 26, 29, 33, 35, 57, 60, 70, 94], W = [−11, −6], D = [−27, −26, −25, −24, −23, −22, −21, −20, 50], I1 = [−14, −13], I1 = [48, 49], L2 = [43~44, 75~76] |
| Struc315 | M = [−96, −56, −49, −18, 0, 8, 36, 41, 49, 59, 62, 65, 60, 93], W = [−79, −76, −59, −54, −46, −13, −4, 5, 44, 53, 92, 94], D = [−31], L1 = [73~74], |
| | L2 = [−81~−80, −6~−5, 77~78, 89~90] |
| Struc316 | M = [−6, 0, 24, 32, 55, 64, 76], W = [−5, 38, 49, 61], D = [68], L1 = [44~46], L2 = [36~37, 40~41, 86~87], L3 = [70~72] |
| Struc317 | M = [−5, 0, 9, 39, 69, 74, 78, 85, 91], W = [−17, −15, −14, −13, −11, 10, 34, 37, 38, 61, 86, 87], L2 = [13~14, 45~46, 55~56], L3 = [31~33] |
| Struc318 | M = [−88, −85, −53, −25, −11, 0, 33, 47, 49, 59, 91], W = [−71, −49, −27, −9, 43, 53, 66, 68, 69, 72, 77, 85, 86], L2 = [−81~−80, −44~−42, −30~−29, 73~74] |
| Struc319 | M = [0, 5, 10, 24, 32, 67, 71, 79, 86], W = [−16, −14, −13, 6, 27, 33, 38, 40, 66, 91], D = [57, 58, 59, 60], L1 = [97~98], L2 = [45~52, 81~82] |
| Struc320 | M = [0, 4, 16, 18, 31, 73, 77, 87, 94], W = [−13, 5, 10, 12, 44, 48, 85, 89, 90], D = [45, 66], I1 = [50, 51] |
| Struc321 | M = [−85, −62, −58, −46, −22, 6, 15], W = [−84, −72, −69, −52], L2 = [−67~−66, −32~−31] |
| Struc322 | M = [−32, −19, −7, −4, 21, 38, 43], W = [−79, −75, −74, −58, −52, −46, −35, −31, −28, −18, −15, −14, −8, 13, 18, 20, 35, 45], I5 = [−14, −73], |
| | I1 = [−72, −71], I15 = [−63, −62], I15 = [−60, −59], I15 = [−59, −58], I1 = [40, 41], L2 = [−66~−66, −44~−44, 10~11, 57~58, 62~63], |
| | L3 = [−2~0, 15~17], L4 = [−82~−80], L8 = [−95~−88], L10 = [31~32] |
| Struc323 | M = [−94, −89, −84, −78, −74, −56, −44, 3, 18, 35, 53, 69], W = [−92, −77, −47, −33, −32, −17, −16, −9, −3, 42, 43, 59, 67, 68], D = [−22, −19, −18], I1 = [87, 88], |
| | L2 = [−49~−48], L4 = [−30~−30] |
| Struc324 | M = [−58, −47, −39, −36, −2, 37, 61, 67, 69, 74, 84], W = [−90, −83, −79, −63, −62, −54, −50, −35, −30, 10, 17, 50, 51, 62], |
| | D = [−78, −23, −22, −21, −20, −19, −18, −17, −16, −15, −14, −13, −11], I2 = [−76, 75], I1 = [−5, 4], I3 = [17, 18], I2 = [95, 96], L1 = [29~31], L2 = [58~59] |
| Struc325 | M = [−76, −66, −43, 6, 13, 27, 33, 59, 73, 76, 79, 85, 95], W = [−77, −61, −59, −55, −47, −46, 9, 47, 64, 65, 84, 94], D = [−13], I2 = [36, 37], L1 = [43~45], |
| | L2 = [−54~−53, 17~18, 21~22], L3 = [−72~−70, −10~−9, 52~54], L4 = [−36~−33] |
| Struc326 | M = [−89, −81, 6, 59, 84], W = [−98, −53, −43, −14, −5, 15, 21, 22, 52, 55, 62, 93], D = [−31, −25], I1 = [−41, −40], I6 = [47, 48], I14 = [51, 52], I11 = [53, 54], |
| | I1 = [70, 71], I7 = [92, 93], I4 = [96, 97], L1 = [−55~−54, 79~80], L2 = [−79~−78, −72~−71, −59~−59, 87~88], L3 = [−48~−46, 16~18, 41~43], L5 = [31~35], |
| | L6 = [−37~−34], L7 = [62~65], L15 = [73~74] |
| Struc327 | M = [−86, −63, −29, −10, 3, 25, 42, 47, 58, 12, 75, 17, 97], W = [−80, −19, −57, −32, −9, −7, 28, 44, 89, 90], D = [−52, 29, 30, 31], I1 = [−13, −12], |
| | L2 = [−97~−96, −75~−74], L3 = [−39~−36] |
| Struc328 | M = [−9, −6, 5, 23, 25, 29, 35, 45], W = [−58, −32, −15, −14, 3, 12, 17, 46, 47, 48], D = [−39, 13, 96, 97], I14 = [−36, −35], I3 = [−32, −31], I3 = [17, 18], |
| | L1 = [82~86], L2 = [70~77], L3 = [−2~0, 60~62], L6 = [51~56] |
| Struc329 | M = [−80, −58, −54, −36, −24, −22, −13, 10, 26, 47, 50, 55, 99], W = [−71, −37, −26, −2, 5, 6, 53, 65, 90], D = [−39, −38, −31], I2 = [−42, −41], |
| | L2 = [−47~−46, 7~8, 18~19, 93~96], L3 = [73~75, 81~83], L13 = [32~35] |
| Struc330 | M = [−95, −73, −46, 18], W = [−96, −55, −27, −23], L1 = [−64~−63], L2 = [−78~−77, −32~−31, 4~5] |
| Struc331 | M = [−82, −60, −40, −32, −3, 6, 15, 21], W = [−81, −73, −72, −37, −36, −8, 10, 11, 18, 22], D = [−93, −92, −88, −87], I1 = [−43, −42], I1 = [−42, −41], I5 = [17, 18], |
| | L2 = [−67~−66, −52~−50, −23~−22] |
| Struc332 | M = [−42, −38, −29, −14, −8, 0, 3, 25, 82], W = [−32, −28, −5, 15, 29, 49, 69, 90, 91, 92], L2 = [37~38, 93~94], L3 = [−27~−25, 31~33] |
| Struc333 | M = [−88, −79, −68, −58, −54, −51, −39, −37, −27, −16, 9], W = [−78, −72, −50, −45, −36, −28, −26, −23, −22, 5, 6, 21], D = [−95], L1 = [−32~−31], L2 = [−19~−18], |
| | L3 = [−75~−73] |
| Struc334 | M = [−82, −67, −60, −16, 6, 19], W = [−73, −72, −58, −39, −27, −8, 11, 18, 22], D = [−93, −92, −88, −87, −31, −30, −29, −28], I2 = [−40, −39], L3 = [−52~−50] |
| Struc335 | M = [−76, −53, −38, −14, 18, 41, 57, 60, 67], W = [−15, −2, 5, 21, 65], D = [94, 95], I14 = [30, 31], L2 = [72~73], L3 = [80~82] |
| Struc336 | M = [−68, −62, −57, −46, −44, −37, −33, −31, −29, −19, −8, −4, 8], W = [−85, −80, −78, −76, −60, −41, −32, −27, −25, −11, −10, 6], I7 = [−94, −93], L2 = [−75~−74] |
| Struc337 | M = [−76, −64, −47, −32, −23, 3], W = [−88, −86, −72, −67, −55, −54, −30, −27, −5, 17, 18], L1 = [−40~−38], L2 = [−29~−28] |
| Struc338 | M = [−79, −72, −68, −58, −54, −44, −31, −6, 2], W = [−78, −55, −45, −28, −26, −5, 5, 21], D = [−40, −39, −16], I1 = [−19, −18], L3 = [16~18], L4 = [−88~−85] |
| Struc339 | M = [−32, −24, −19, 0, 9, 21, 30, 35, 77, 82], W = [−48, −45, −18, −15, −14, 16, 25, 26, 33, 47, 48, 57, 81], L1 = [66~68], L3 = [71~72], L4 = [−10~−7] |
| Struc340 | M = [−97, −59, −57, −29, −14, 3, 22, 58, 65, 76, 93], W = [−70, −61, −35, 5, 6, 9, 28, 77], L2 = [−47~−46, 46~47, 54~55], L5 = [37~39] |
| Struc341 | M = [−68, −63, −22, 4], W = [−71, −55, −45, −24, −8, 5, 10], D = [−39, −38, −34, −33, −32, −31], I8 = [−73, −72], I4 = [−24, −23], L1 = [−97~−94], L2 = [−87~−86], |
| | L4 = [15~18] |
| Struc342 | M = [−92, −84, −79, −60, −56, −50, −27, 6, 23], W = [−70, −53, −52, −38, −31, −22, 16, 22], D = [−72], I2 = [−38, −37], L2 = [−67~−66, 17~18] |
| Struc343 | M = [−98, −94, −84, −74, −61, −35, −30, 3, 27, 36, 46, 53, 65, 69], W = [−92, −91, −17, −47, −33, −17, −9, 15, 42, 43, 47, 60, 85, 95, 99], I1 = [87, 88], |
| | I1 = [91, 92], L2 = [−49~−48, −21~−20] |
| Struc344 | M = [−58, −48, −44, −29, −9, −6, 0, 35, 45, 95], W = [−87, −82, −65, −45, −43, −27, −20, 7, 12, 19, 34, 36, 39, 49], I1 = [−32, −31], L1 = [−25~−24, 71~81], |
| | L2 = [−89~−88, −63~−62, −54~−53, 5~6, 47~48], L3 = [−81~−78, −69~−68, −16~−15, 89~91], L4 = [58~63] |
| Struc345 | M = [−54, −50, −39, −31, −5, 17, 21], W = [−86, −84, −72, −28, −27, −26, −23, −22], L2 = [−75~−74, 5~6] |
| Struc346 | M = [−86, −63, −56, 19], W = [−77, −70, −69, −23, −8, −5, 8, 10, 16], I4 = [15, 16], L3 = [−30~−28] |
| Struc347 | M = [−42, −38, −10, −7, 0, 7, 9, 19, 29, 53, 78], W = [−67, −63, −56, −35, −17, −16, −9, 3, 15, 23, 25, 57, 91], I2 = [81, 82], I1 = [95, 96], L1 = [32~35], |
| | L2 = [84~85], L3 = [70~75], L4 = [−62~−62, 25~26, 60~63], L7 = [−48~−45] |
| Struc348 | M = [−61, −25, −14, 0, 11, 26, 48, 76, 81], W = [−99, −97, −93, −91, −68, −66, −64, −56, −55, −47, −44, −34, −33, −28, −18, −16, −15, 9, 15, 16, 17, 39, 42, 43, |
| | 47, 58, 82], D = [−89, 38], I1 = [65, 66], L2 = [−79~−78, −71~−69, −38~−37, 4~5, 53~54], L3 = [−9~−7] |
| Struc349 | M = [−84, −31, 4, 17], W = [−72, −41, −39, −38, −32, −22] |
| Struc350 | M = [−83, −80, −68, −54, −46, −44, −33, −8, 0, 6, 18], W = [−86, −85, −75, −48, −45, −29], L2 = [−94~−93, −78~−77, −73~−72, 21~22] |
| Struc351 | M = [−80, −74, −71, −67, −44, −34, −30, 5], W = [−90, −86, −83, −79, −54, −43, −24, −19, −8, 16], L2 = [−27~−26], L3 = [−23~−22] |
| Struc352 | M = [−88, −74, −62, −52, −24, 21], W = [−95, −77, −69, −64], L1 = [−40~−38, −28~−27], L2 = [4~5], L3 = [−32~−31] |
| Struc353 | M = [−50, −48, −10, 0, 7, 19, 27, 34, 38, 78, 85, 99], W = [−70, −66, −35, −17, −15, −9, 3, 23, 47, 48, 67], I3 = [−38, −37], I2 = [81, 82], I1 = [95, 96], |
| | L2 = [−42~−41, −8~−7, 9~10, 53~54, 71~75], L4 = [60~63], L6 = [−56~−56], L7 = [−16~−16], L15 = [−63~−63] |
| Struc354 | M = [−64, −57, −45, −32, 3, 5, 21], W = [−86, −85, −67, −55, −54, 16, 17], D = [−49, −48, −47], L1 = [−40~−38], L2 = [−30~−29] |
| Struc355 | M = [−90, −82, −38, −25, −11, 3, 5, 14, 21], W = [−74, −72, −51, −45, −43, −28, −27, 4, 15, 18], L2 = [−55~−54], L3 = [−61~−59] |
| Struc356 | M = [−54, −50, −31, −12, −5, 6, 19], W = [−86, −37, −32, −28, −27, −26, −23, −22, 10], L2 = [−78~−77, −39~−38] |
| Struc357 | M = [−51, −45, −32, −23, 0, 10, 28, 51, 54, 76, 85, 98], W = [−26, −15, −14, 16, 26, 71, 88, 95, 96, 99], D = [−18], L2 = [31~36, 43~44], L3 = [−40~−37] |
| Struc358 | M = [−82, −80, −76, −57, −51, −11, −8, 0, 3, 5, 25, 33, 65], W = [−98, −91, −77, −55, −17, −16, −6, 14, 15, 32, 40, 44, 46, 47, 50, 52, 61, 77, 83, 84], |
| | D = [−33, −32, −31, −30, −29, −28, −27, −26, −25, 58], I1 = [−91, −90], I1 = [−63, −62], I3 = [−62, −61], I2 = [83, 84], I3 = [87, 88], L2 = [−97~−96, −43~−43, 37~38] |
| Struc359 | M = [−86, −74, −52, −15, −9, 10], W = [−69, −27, −22, −14, −8, 16], D = [−92, −39, −38], L4 = [−62~−59] |
| Struc360 | M = [−55, −15, −2, 69, 92], W = [−62, −49, −38, −34, −30, −25, −16, −5, 18, 26, 50, 62, 91], D = [−22, 53, 87], I5 = [−38, −37], I15 = [−33, −32], I1 = [−21, −20], |
| | L1 = [41~42], L2 = [−43~−43, 33~34], L3 = [81~83], L5 = [75~78] |
| Struc361 | M = [−93, −89, −85, −42, −23, −7, −4, 0, 7, 15], W = [−98, −91, −90, −87, −76, −67, −60, −48, −38, −28, −22, −9, 12, 18, 22, 26, 45], D = [−27, −26, −25, 43], |
| | I1 = [−19, −18], I1 = [34, 35], L1 = [37~38], L2 = [−45~−44, −35~−34, 20~21] |
| Struc362 | M = [−68, −63, −55, −49, −39, −11, 4], W = [−94, −87, −69, −45, −37, −33, −28, −8, 5, 6, 21, 22], D = [−92, −86], I8 = [−73, −72], L2 = [−97~−96], L4 = [15~18] |
| Struc363 | M = [−89, −86, −63, −21, −16, −10, −6, 9, 25, 28, 47, 58, 75, 79, 92, 97], W = [−81, −54, −32, −28, −27, −19, −7, 4, 12, 24, 48, 49], D = [−67, −52, 44], I1 = [41, 42], |
| | L2 = [−80~−79], L4 = [−97~−94] |
| Struc364 | M = [−85, −81, −55, −50, −46], W = [−51, −42, −13, −5, 10, 19], I1 = [−68, −67], L2 = [−28~−27], L3 = [4~6] |
| Struc365 | M = [−64, −47, −40, −38, 3, 21], W = [−88, −86, −85, −31, 4, 16], D = [−95, −94, −93, −92, −91], I1 = [7, 8], L2 = [−30~−29], L6 = [16~17] |
| Struc366 | M = [−85, −62, −44, −20, −11], W = [−88, −69, −55, −23, −22, 17], D = [−39, −38], L1 = [−52~−49], L2 = [−75~−74], L3 = [14~16] |
| Struc367 | M = [−92, −60, −50, 5], W = [−84, −72, −53, −52, −37, −36, −9, 6, 16], D = [−82], I1 = [−81, −80], I2 = [−39, −38], L2 = [−76~−75, −67~−66, −43~−42, −31~−30, 9~10] |
| Struc368 | M = [−77, −74, −8, 14, 19], W = [−63, −68, 27, −10, −5], D = [−39, −38], L2 = [−54~−47, −23~−22] |
| Struc369 | M = [−88, −83, −79, −68, −66, −58, −54, −46, −44], W = [−82, −78, −55, −45, −26, −23, 5], D = [−16], I1 = [−19, −18], I1 = [7, 8], I1 = [23, 24], |
| | L2 = [−76~−75, −32~−31, −7~−6], L4 = [15~19] |
| Struc370 | M = [−60, −36, −29], W = [−46, −28, −6, 5, 21, 22], I2 = [−39, −38], L1 = [−71~−70], L2 = [−76~−75, −23~−22], L3 = [−67~−66], L6 = [−55~−50] |
| Struc371 | M = [−60, −43, −37, −33, −15, −2, 29, 90], W = [−83, −79, −74, −59, −47, −46, −16, −14, 30, 48, 72, 85], D = [−78, −77, −76, 34, 35, 36, 37], I1 = [−68, −67], |
| | I8 = [42, 43], L2 = [−28~−27, 14~15], L3 = [−70~−70, −54~−52, 65~67], L4 = [7~10], L5 = [50~54] |
| Struc372 | M = [−68, −63, −58, −44, −16, 5, 17, 22], W = [−69, −47, −46, −45, −6, 16], I1 = [−27, −26], I3 = [−25, −24], L8 = [−93~−93], L2 = [−55~−54], L6 = [−39~−30] |
| Struc373 | M = [−98, −57, −40, 17], W = [−99, −73, −67, −54, −48, −47, −32, −31, −4, 16, 18], D = [−86], I1 = [−89, −88], L2 = [−78~−77] |
| Struc374 | M = [−31, −27, −5, 0, 8, 25, 32, 72, 94], W = [−50, −22, −14, −3, 9, 34, 37, 49, 50, 71, 91], L2 = [88~89] |
| Struc375 | M = [−42, −8, 0, 3, 25, 39, 50, 54, 82, 87, 93], W = [−32, −17, 7, 9, 10, 15, 16, 29, 38, 49, 69, 71, 72, 91, 92, 95], D = [−37, −36], I1 = [−27, −26], L1 = [−31~−30], |
| | L3 = [33~35] |
| Struc376 | M = [−68, −33, −13, −2, 7, 20, 24, 58, 67, 73, 75, 78], W = [−98, −97, −96, −95, −92, −85, −42, −36, 5, 6, 19, 49, 51, 52, 53, 56, 63, 83, 93], D = [29, 30, 31], |
| | I3 = [−96, −95], I2 = [−53, −52], I5 = [−51, −50], I1 = [−48, −47], I15 = [−44, −43], I6 = [−40, −39], I1 = [44, 45], |
| | L2 = [−94~−93, −58~−57, −28~−27, −20~−19, 35~36, 69~10], L3 = [−84~−82], L5 = [−74~−71] |
| Struc377 | M = [−77, −68, −48, −38, −8, 2, 4], W = [−54, −39, −37, −36, −29, 6, 18], L2 = [−94~−94, −32~−31, −24~−23], L3 = [−88~−86, −45~−43] |
| Struc378 | M = [−72, −29, −16, −10, 0, 18, 21, 54, 86], W = [−47, −46, −45, −13, −9, 3, 36, 40, 41, 60, 61, 75], D = [71, 76, 77], I1 = [−51, −50], I3 = [26, 27], I1 = [30, 31], |
| | I1 = [32, 33], I1 = [34, 35], I5 = [68, 69], I1 = [92, 93], L1 = [−54~−53], L2 = [63~64], L3 = [7~9] |
| Struc379 | M = [−79, −65, −62], W = [−44, −37, −22, 21, 22], D = [−27, −26, −25, −24, −16, −6], I2 = [−92, −91], I1 = [−19, −16], I1 = [−4, −3], L1 = [−87~−85, −58~−49, −43~−40], |
| | L2 = [−36~−34] |
| Struc380 | M = [−59, −16, 0, 3, 16, 53], W = [−84, −83, −72, −71, −60, −47, −34, −33, −28, −24, −18, −14, −8, 9, 26, 32, 39, 44, 47, 48, 52], D = [−54, 66, 67, 68, 69, 70], |
| | I1 = [−90, −89], L2 = [19~20], L6 = [58~59] |
| Struc381 | M = [−93, −86, −76, −66, −52, −47, −40, 31], W = [−94, −91, −90, −83, −54, −49, −32, −21, −17, −15, −11, 23, 24, 26, 32], D = [20, 37], L3 = [−2~0] |
| Struc382 | M = [−74, −56, 0, 8, 24, 29], W = [−90, −71, −68, −57, −55, −54, −50, −42, −39, −15, −14, −9, −8, 41], D = [−94], I1 = [−97, −96], L1 = [57~51], |
| | L2 = [−83~−88, −70~−69, −7~−6], L4 = [45~48], L5 = [−47~−45] |
| Struc383 | M = [−93, −76, −70, −66, −58, −53, −43, −30, −19, 15, 39, 53, 83, 93, 96], W = [−54, −49, −47, −44, −29, −25, −6, 17, 18, 21, 33, 56, 57, 59, 75], I15 = [31, 32], |
| | I13 = [33, 34], L2 = [−84~−83, −15~−14, 8~9], L6 = [64~67] |
| Struc384 | M = [−75, −67, −60, −27, 2], W = [−83, −80, −72, −30, −23, 15, 18], I2 = [−39, −38], L4 = [−53~−50] |
| Struc385 | M = [−7, 0, 52, 59, 85, 98], W = [−58, −57, −55, −47, −46, −31, −26, −15, −14, 8, 16, 26, 51, 71, 88, 94, 97, 99], D = [−20, −19, −18, 33, 34, 35, 36], I2 = [−38, −37], |
| | I15 = [−37, −36], I6 = [76, 77], L2 = [−53~−52, 9~10], L5 = [−42~−41] |
| Struc386 | M = [−98, −94, −80, −77, −68, −54, −44, −16, 22], W = [−85, −39, −38, −33, −28, −27, −25, −7, 3, 15, 16, 17, 18, 23], L2 = [−49~−48, −32~−31] |
| Struc387 | M = [−92, −61, −33, −30, 17, 34, 89], W = [−94, −90, −69, −64, −47, −44, −15, −14, 9, 10, 79, 80], D = [−76, −75], I11 = [−39, −38], I14 = [−35, −34], I14 = [−32, −31], |
| | I1 = [61, 62], L2 = [5~6, 52~53] |
| Struc388 | M = [−97, −94, −50, −46, −22], W = [−59, −54, −51, −47, −13, 15, 23], I1 = [−69, −68], I2 = [15, 16], L2 = [−40~−39, −32−31], L3 = [4~6], L6 = [17~18] |
| Struc389 | M = [−89, −61, −56, −45, −37, 0, 11, 16], W = [−84, −60, −52, −51, −36, −23, −22, −13, 5, 18], D = [−81], L2 = [−93~−92, −18~−17], L4 = [−49~−49], L7 = [−75~−69] |
| Struc390 | M = [−94, −85, −56, −54, 8, 17, 50, 61, 78], W = [−72, −19, −15, −8, 5, 6, 35, 43, 47, 51, 65, 75, 98, 99], D = [−45, −44, −43, −42, −41, −40, −39, −38, −37], |
| | I1 = [−28, −27], L2 = [−77~−76, 31~32, 39~40, 88~89] |
| Struc391 | M = [−82, −27, −22, 8, 15], W = [−27, −32, 17], L2 = [−41~−38, 5~6] |
| Struc392 | M = [−80, −76, −74, −70, −61, −6, 0, 6, 22, 37, 45, 50, 68, 73, 89], W = [−99, −98, −97, −59, −57, −53, −43, −37, −28, 15, 16, 52, 57, 58, 76, 84, 90], |
| | D = [−51, −31, −30], I1 = [−55, −54], I1 = [−15, −14], I2 = [41, 42], |
| | L2 = [−41~−40, −13~−13, 96~97], L3 = [−25~−25, 8~10], L6 = [−89~−84] |
| Struc393 | M = [−97, −92, −82, −73, −62, −57, −36, −11, −6, 0, 41, 85, 94], W = [−99, −93, −24, −23, 46, 50, 75, 78, 89, 96], I4 = [24, 25], L2 = [47~48, 60~61, 67~68], L3 = [6~8], |
| | L4 = [30~35] |
| Struc394 | M = [0, 29], W = [−43, −38, −8, 21, 22, 31, 71, 74, 80, 98], D = [43, 44, 45, 46, 47, 48, 49, 50, 51, 52, 53, 54, 55, 60, 61, 62, 63, 64, 65, 66, 67, 68, 69, 70], |
| | I1 = [−21, −20], L3 = [85~88] |
| Struc395 | M = [−85, −39, −36, 8, 13, 55, 73, 77, 79], W = [−79, −77, −71, −70, −47, −15, −2, 21, 35, 42, 43, 60, 70, 74, 96, 99], D = [−49, 50, 89, 90], I1 = [−51, −50], |
| | I8 = [32, 33], L2 = [−58~−57, 5~6, 17~18, 97~98], L3 = [67~69] |
| Struc396 | M = [−95, −93, −43, −39, −23, 0, 16], W = [−40, −30, −26, −5, −4, 2, 8], I1 = [−3, −2], L4 = [−58~−55] |
| Struc397 | M = [−62, −58, −47, −41, −18, −13, −9, 3, 18], W = [−99, −86, −17, −3, 19, 29, 30, 31, 33], D = [−26, −25], I1 = [−89, −88] |
| Struc398 | M = [−81, −18, −8, −3, −1, 50, 63, 75], W = [−95, −89, −49, −46, −39, −32, 15, 33, 42, 46, 78, 100], D = [−45, −44, −43, −31, −30], I11 = [35, 36], L2 = [66~67], |
| | L3 = [55~57] |
| Struc399 | M = [−61, −36, −23, 4, 44, 72, 89], W = [−63, −30, −28, −27, −17, 9, 25, 31, 48, 54, 57, 74, 81, 95, 96], I13 = [52, 53], I5 = [64, 65], I13 = [75, 76], I15 = [77, 78], |
| | I8 = [86, 87], L2 = [−77~−76, −33~−32, 83~84], L3 = [−58~−56], L4 = [54~55] |
| Struc400 | M = [−49, −28, −17, −10, −5, 12, 34, 43, 66, 68, 74], W = [−61, −40, 6, 7, 14, 16, 76, 79, 80], D = [−44, 20, 21, 22, 23, 24, 25, 26, 27], I1 = [−88, −87], |
| | I1 = [40, 41], L2 = [−57~−56, 54~55], L3 = [−67~−64] |
| Struc401 | M = [−87, −72, −69, −52, −44, −25, −12, −8, 0, 39, 45, 51, 57], W = [−81, −80, −78, −67, −50, −45, −42, −37, −35, −29, −24, −18, 2, 8, 10, 14, 15, 28, 37, 38], |
| | D = [−94], I2 = [30, 31], I6 = [33, 34], L2 = [−77~−76], L3 = [−57~−55] |
| Struc402 | M = [−66, −64, −33, −26, −23, −19, −11, −4, 8, 25, 38, 54, 81, 84], W = [−98, −97, −96, −93, −90, −89, −84, −78, −45, −30, −28, −13, −3, 7, 10, 11, 39, 73, 85, 89, 95], |
| | D = [75, 76], I3 = [−86, −85], I2 = [−79, −78], I11 = [71, 72], I3 = [89, 90], L2 = [−95~−94, −92~−91, −74~−73, −15~−14, 31~32, 57~58], L3 = [−61~−59, 17~19], |
| | L4 = [44~47], L6 = [61~66] |
| Struc403 | M = [−43, −5, 0, 14, 32, 43, 43, 61, 98], W = [−73, −61, −17, −13, −11, −6, 23, 47, 50, 54, 89], D = [−64], I1 = [93, 94], L1 = [−70~−69, −58~−57], L2 = [3~4], |
| | L3 = [−76~−75, −39~−37], L4 = [−31~−28] |
| Struc404 | M = [−81, −74, −65, −61, −44, −15, 0, 16, 45, 47], W = [−97, −62, −52, −46, −45, −24, −23, 3, 4, 29, 50, 59, 62], D = [−26, 37], I1 = [−26, −25], |
| | L2 = [−78~−77, −35~−34, −5~−4, 9~10, 31~32, 54~55], L3 = [−54~−53], L6 = [−90~−85] |
| Struc405 | M = [−86, −7, −69, −38, −36, −28, −18, −16, −5, 3, 8, 26, 32, 35, 59, 77, 93], W = [−80, −70, −68, −58, −12, 10, 40, 53, 55, 56, 61], L2 = [98~99], L3 = [48~50], |
| | L5 = [65~67] |
| Struc406 | M = [−87, −85, −69, −48, −34, −25, −15, −4, 1, 8, 24, 46, 89, 94], W = [−98, −96, −93, −81, −79, −75, −71, −64, −61, −32, −31, −27, 32, 39, 74, 76, 84], |
| | D = [26, 30, 64, 65, 66, 67], I8 = [−75, −74], I1 = [−61, −60], I2 = [33, 34], L2 = [−95~−94, 56~58], L3 = [−57~−55] |
| Struc407 | M = [−90, −60, −57, −37, −19, 2, 10, 14, 21, 52, 86], W = [−72, −58, −40, −34, −30, −10, −3, 25, 26, 37, 50, 68, 70, 75, 82], D = [−64, −28, −6, −5, 48, 49, 88, 90], |
| | I1 = [−16, −15], I1 = [33, 34], I2 = [43, 24], I13 = [63, 64], I13 = [65, 66], |
| | I13 = [74, 75], I1 = [94, 95], L2 = [−32~−31, −14~−13, 39~41], L4 = [70~72], L5 = [98~99] |
| Struc408 | M = [−93, −81, −72, −42, −38, −18, −8, −6, −1, 2, 47, 65, 82], W = [−84, −78, −73, −51, −44, −30, −26, −15, 4, 46, 54, 61, 67, 80, 86], D = [−32, −31, 45], |
| | I3 = [31, 32], I1 = [62, 63], L2 = [−77~−76, −48~−47] |
| Struc409 | M = [−90, −59, −41, −30, −26, 4, 8, 30], W = [−43, −35, −21, −14, 18, 23, 28, 33], I4 = [−34, −33] |
| Struc410 | M = [−45, −40, −26, −23, −7, 0, 4, 19, 43, 70, 14, 93, 96], W = [−61, −60, −38, −35, −33, −11, −9, −8, 5, 17, 26, 25, 57, 59, 77, 79, 84, 91, 97], D = [22, 23, 24], |
| | L1 = [81~83], L2 = [−48~−47, 61~62], L3 = [−59~−56, 47~49] |
| Struc411 | M = [−83, −76, −65, −63, 0, 4, 10, 34, 57], W = [−93, −87, −53, −45, −40, −13, −12, 55], D = [−54, −22, −21, −20], I3 = [−26, −25], I1 = [24, 25], I1 = [26, 27], |
| | L1 = [73~76], L2 = [−97~−96, 20~21, 59~60, 69~70], L3 = [−73~−71, −34~−31], L6 = [13~17] |
| Struc412 | M = [−34, −21, −10, 0, 3, 13, 54, 57, 63, 88], W = [−47, −41, −40, −38, −29, −18, 8, 9, 16, 31, 42, 62, 64], D = [23, 91], I7 = [−41, −40], I1 = [20, 21], |
| | I14 = [83, 84], I1 = [92, 93], L9 = [−36~−36], L2 = [45~46] |
| Struc413 | M = [−80, −76, −45, −18, −5, 0, 5, 7, 45, 64], W = [−79, −73, −35, −23, 8, 12, 29, 30, 40, 70, 77], I1 = [−41, −40], I1 = [33, 34], I2 = [58, 59], L2 = [−25~−24], |
| | L3 = [35~37], L4 = [67~69, 73~76] |
| Struc414 | M = [−81, −76, −71, −30, −28, −21, 3, 11, 27, 43, 58, 99], W = [−77, −48, −47, −31, −7, −6, 36, 42, 44, 70, 84, 92, 93], I1 = [−90, −89], I4 = [−85, −84], |
| | I5 = [34, 35], L2 = [−94~−94, −37~−36, −14~−13] |
| Struc415 | M = [−64, −8, 6, 43, 54], W = [−80, −42, −40, −11, −10, 17, 20, 42, 44, 45, 55, 56, 57], D = [12, 77, 78, 79, 80, 81, 82, 83, 84, 85, 86, 87, 88, 89, 90], |
| | I1 = [−53, −52], I1 = [18, 19], I1 = [22, 23], L1 = [65−68], L2 = [−73~−72, −35~−34, −13~−12, −1~0], L3 = [31~33, 39~41] |
| Struc416 | M = [−98, −85, −69, −57, −42, −34, −6, −4, 0, 2, 22, 47], W = [−70, −67, −25, −24, −18, −17, 6, 9, 45], L2 = [29~30, 37~38], L4 = [−80~−77] |
| Struc417 | M = [−77, −53, −10, −7, −4, 35], W = [−80, −76, −72, −61, −60, −58, −12, 10, 40, 47, 53, 55, 56, 61, 62, 73, 74, 82, 91], L2 = [−69~−68, −14~−13], L3 = [−39~−37] |
| Struc418 | M = [−63, −13, −4, 0, 69, 71], W = [−64, −21, −8, 8, 38, 42, 54, 58, 68, 74], D = [35], I1 = [30, 31], I1 = [43, 44], L2 = [13~16], L3 = [21~23] |
| Struc419 | M = [−72, −67, −28, −25, −18, −16, −7, 0, 3, 25, 53, 66, 71, 76, 97], W = [−76, −65, −64, −61, −43, −23, −15, −11, 41, 56, 70, 90, 92, 93], I5 = [−98, −97], |
| | I1 = [11, 12], L2 = [−81~−80, [−78~−77, 8~9, 36~37, 84~85], L3 = [−36~−34], L4 = [−42~−39] |
| Struc420 | M = [−41, −12, −3, 18, 20, 37, 45, 47, 66], W = [−45, −44, −28, −10, 4, 5, 58, 94, 95], I1 = [25, 26], I7 = [52, 53], I3 = [82, 83], L6 = [27~29] |
| Struc421 | M = [0, 22, 44, 71, 91, 94], W = [−40, −24, 8, 9, 20, 31, 59, 79], L1 = [81~82], L2 = [−41~−41, −30~−29, 62~63], L3 = [−7~−5] |
| Struc422 | M = [−78, −71, −65, −45, −33, −27, −5, 0, 7, 36], W = [−79, −77, −73, −55, −41, −35, −17, 5, 12, 38], I1 = [−42, −41], I1 = [58, 59], L2 = [44~45] |
| Struc423 | M = [−95, −93, −58, −43, −39, −33, −31, −23, −9], W = [−40, −24, −3], L2 = [−26~−25, −1~0] |
| Struc424 | M = [−61, −56, −45, −5, 0, 7, 36, 62], W = [−84, −76, −75, −73, 29, 30, 40, 46], I1 = [−98, −97], I1 = [−40, −39], I1 = [−21, −20], I1 = [33, 34], I3 = [76, 77], |
| | L1 = [−25~−24], L6 = [64~69] |
| Struc425 | M = [−88, −78, −66, −57, −55, −51, −43, −41, −28, −23, −8, 0, 8, 11, 38], W = [−97, −42, −9, 5, 17, 27], D = [64], L2 = [−93~−92, −81~−80, 46~47], L3 = [−38~−36] |
| Struc426 | M = [−67, −49, 10, 16, 38, 65, 89], W = [−48, −42, −28, 24, 29, 33, 47, 55, 56, 68, 17, 90, 91, 92, 96, 98], D = [−25, −24, −23], I1 = [−6, −5], |
| | L2 = [−74~−73, 25~26, 79~80], L3 = [−1~1], L4 = [−61~−61], L5 = [−55~−55] |
| Struc427 | M = [−49, −36, −10, 0, 13, 17, 31, 82, 95], W = [−70, −61, −54, −48, −28, −26, 2, 25, 30, 33, 38, 44, 59, 60, 68, 78, 92, 93, 98], I1 = [−75, −74], I1 = [45, 46], |
| | I1 = [53, 54], I3 = [65, 66], I3 = [68, 69], I1 = [69, 70], L2 = [−63~−62, −14~−13, −8~−7, 79~80], L10 = [71~72], L4 = [−33~−30], L6 = [−72~−72] |
| Struc428 | M = [−70, −32, −24, −22, −8, 0, 13, 28], W = [−50, −47, −19, −18, −16, 25, 29, 30, 46], D = [−42, −41], I1 = [44, 45], L3 = [20~22] |
| Struc429 | M = [−84, −80, −48, −36, −32, −21, −14, −10, 10, 46, 50], W = [−83, −76, −46, −38, 9, 17, 26, 27, 39, 48, 71, 72, 75, 78], D = [−96, 54], |
| | L2 = [−75~−74, −60~−59, −40~−39, −1~0, 31~32, 59~60] |
| Struc430 | M = [−45, −40, −4, 1, 5, 15], W = [−91, −89, −81, −54, −7, −6, −5, 13, 32, 45], D = [−96, −95, −94, −93, 56, 57, 58], I1 = [−38, −37], I2 = [53, 54], I1 = [60, 61], |
| | L1 = [−35~−34], L2 = [−85~−85, −29~−28, 8~9, 11~12], L4 = [−77~−77, 26~29], L6 = [−62~−59] |
| Struc431 | M = [−96, −84, −73, −59, −36, −31, −26, −23, −14, −9, 10, 27, 68, 72], W = [−78, −17, −74, −66, −65, −42, −21, −10, 3, 9, 13, 16, 21, 35, 38, 58], D = [−62], |
| | L1 = [−41~−40], L2 = [−69~−68, −1~0, 22~23, 31~32], L3 = [−51~−48] |
| Struc432 | M = [−54, −50, −45, −30, −5, 0, 13, 16, 50, 67, 70, 87, 89], W = [−68, −52, −29, −25, −21, 35, 47, 48, 51, 5, 78, 88], I1 = [−22, −21], I15 = [34, 35], |
| | I15 = [35, 36], I15 = [36, 37], I5 = [37, 38], I8 = [−37~−35], L1 = [−42~−40, −28~−27], L2 = [−20~−19], L6 = [56~61] |
| Struc433 | M = [−94, −88, −46, −38, −22, −18, 8, 21], W = [−93, −70, −32, −28, −17, −8, 2], I1 = [−10, −9], L2 = [−55~−54] |
| Struc434 | M = [−92, −86, −69, −44, −15, −10, 1, 7, 14, 46, 85, 94], W = [−96, −95, −94, −79, −78, −75, −71, −54, −31, −28, −21, −11, −6, −5, 4, 11, 20, 31, 32, 39, 40, 55, 65, |
| | 82, 84, 93], D = [71, 72, 73, 74, 75, 76, 17, 78, 79], I1 = [30, 31], L1 = [−26~−25, 27~28], L2 = [−57~−56, −50~−49, −32~−32, 56~57], L3 = [65~66, 87~89], |
| | L7 = [−39~−38] |
| Struc435 | M = [−96, −68, −20, −14, 10, 16, 23, 60, 66], W = [−83, −64, −32, −31, −25, −21, −13, 9, 17, 18, 59, 72], D = [−75, −74, −41, −2], I2 = [−71, −70], I3 = [−52, −51], |
| | L2 = [45~46], L3 = [69~71] |
| Struc436 | M = [−96, −63, −20, 0, 6, 11, 16, 45, 60], W = [−32, −31, −26, −21, −13, −6, 9, 15, 31, 43, 59], D = [−76, −75, −52, −51, −50, 69, 70], I1 = [73, 74], |
| | I1 = [75, 76], L2 = [−8~−7, 22~23, 33~34], L4 = [−71~−70], L6 = [37~38] |
| Struc437 | M = [−79, −76, −73, −63, −58, −50, −29, −26, −4, 7, 22], W = [−82, −55, −39, −38, −31, −30, −25, −8, 6, 10], I1 = [−68, −67], L1 = [14~15], L2 = [−95~−94, −1~0] |
| Struc438 | M = [−61, −56, −34, 9, 20, 22, 34, 50, 53, 68, 87], W = [−39, −38, −7, 13, 76, 82], D = [−15, −14, −10, −9, −8], L2 = [−47~−46, 0~1, 16~17, 77~78], |
| | L3 = [−32~−30, 90~92] |
| Struc439 | M = [−95, −87, −72, −63, −44, −23, −19, −4, 10, 14, 20, 22, 36, 69, 83, 97], W = [−94, −89, −86, −71, −58, 21, 23, 24, 26, 31, 32, 57, 76], D = [44, 45], |
| | I3 = [65, 66], L2 = [−30~−29, −1~0, 88~89] |
| Struc440 | M = [−84, −77, −65, −57, −23, −16, −13, −6, 0, 15, 31, 40, 46, 66], W = [−80, −28, 7, 8, 27, 32, 69, 70], L1 = [−35~−29], L2 = [−70~−69, 22~23, 25~26], |
| | L5 = [72~73] |
| Struc441 | M = [−96, −90, −47, −43, −31, −22, 0, 21, 54, 83, 85, 99], W = [−97, −91, −81, −74, −68, −67, −59, −40, −33, −17, −14, −11, −6, 3, 8, 9, 33, 34, 40, 93], D = [3], |
| | I2 = [−81, 80], I1 = [37, 38], I1 = [39, 40], L1 = [44~46], L2 = [57~58, 69~78], |
| | L3 = [−78~−78, −36~−34, −16~−15], L4 = [−64~−60] |
| Struc442 | M = [−45, −37, −32, −25, −16, 4, 7, 47], W = [−48, −43, −31, −27, −4, −3, 61, 66, 100], D = [35, 82], I4 = [60, 61], I1 = [78, 79], L1 = [15~16, 50~54], |
| | L2 = [−11~−10], L3 = [22~24] |
| Struc443 | M = [−24, −14, −8, 0, 24, 29, 55, 60, 65, 71], W = [−72, −71, −60, −59, −22, 4, 15, 51, 75, 76], |
| | D = [−87, −86, −85, −84, −83, −82, −81, −80, −79, −78, −77, −76, −75, −74, −31, 32], I4 = [−38, −37], I1 = [35, 36], L2 = [−63~−62, −54~−53], L3 = [40~42] |
| Struc444 | M = [−79, −72, −69, −52, −38, −35, −28, −12, 3, 34, 45], W = [−93, −77, −76, −68, −67, −50, −39, −37, −29, −24, 5, 8, 10, 15, 37, 38, 40, 43], D = [−87, −86], |
| | I2 = [−93, −92], I12 = [50, 51], L1 = [55~57], L2 = [−18~−17, 29~30], L3 = [−57~−55, −1~1] |
| Struc445 | M = [−89, −84, −70, −59, −51, −33, −31, −23, −9, 0], W = [−79, −55, −47], L2 = [−17~−73, 9~10] |
| Struc446 | M = [−95, −80, −71, −29, −12, 16, 26], W = [−93, −86, −81, −72, −63, −40, −37, −32, −31, −10, −9, 5, 15, 38], D = [−41], L2 = [−75~−74], L3 = [21~23, 29~32] |
| Struc447 | M = [−95, −79, −66, 0, 26, 35, 52, 59], W = [−73, −63, −58, −20, −13, −4, 31, 32, 69, 70, 73, 75], D = [15, 16], I1 = [−29, −48], L2 = [−24~−23, 71~72] |
| Struc448 | M = [−95, −79, −74, −71, −29, −23, −21, −13, 16, 32], W = [−81, −64, −63, −40, −37, −32, −31, −9, 5, 7, 13, 17, 26, 38], D = [−49], L3 = [27~29] |
| Struc449 | M = [−55, −38, −29, −25, 8, 12, 26], W = [−95, −75, −74, −72, −52, −42, −24, 13, 16, 24, 28, 29, 32, 36, 37, 40, 41], D = [−51], I2 = [−79, −78], I12 = [−45, −44], |
| | I13 = [−42, −41], L8 = [17~19], L2 = [−4~−3, 42~43], L3 = [−94~−90, 33~35], L4 = [−62~−60] |
| Struc450 | M = [−52, −41, −20, −3, 6], W = [−89, −72, −32, −17, −9, 4, 14, 30, 37, 38, 44, 45, 55], D = [−50], I1 = [49, 50], L2 = [−56~−55, −35~−34, 12~13], L4 = [−80~−77] |
| Struc451 | M = [−93, −90, −69, −66, −55, −51, −47, −41, 0, 8], W = [−64, −46, −43, −35, −21, −14, −9, 18, 23, 28], I1 = [−59, −58], L8 = [−33~−30] |
| Struc452 | M = [−73, −24, 0, 8, 18, 33, 72, 74, 97], W = [−72, −70, −28, 4, 21, 31, 65, 66, 94, 98], I4 = [43, 44], L1 = [77~78], L2 = [56~57, 61~62], L3 = [−10~−8] |
| Struc453 | M = [9, 21, 24, 29, 42, 46, 55, 72, 76], W = [−44, −39, −33, −21, −17, 4, 5, 13, 14, 62, 68, 70, 82], I1 = [−28, −27], L1 = [−25~−24, 32~33] |
| Struc454 | M = [−91, −81, −72, −57, −39, −24, −12, 26, 32, 38, 45, 59, 98], W = [−71, −70, −67, −60, −43, −33, −22, −6, 3, 4, 42, 62, 64, 89, 92], D = [49], I1 = [46, 47], |
| | L2 = [−77~−76, −1~0] |
| Struc455 | M = [−67, −59, −56, −28, −14, 27, 38, 59], W = [−86, −83, −52, −75, −41, −36, −30, −24, −18, 16, 22, 23, 39, 49, 67, 76], D = [−37], L2 = [−14~−73, −40~−39, 9~10], |
| | L3 = [−23~−21], L5 = [−50~−48] |
| Struc456 | M = [−22, 6, 10, 21, 26, 32, 38, 45, 49], W = [−42, −41, 13, 14, 16, 33, 48, 54, 55, 57, 59, 63, 82], D = [−6, 60, 85], L2 = [−30~−29, 52~53, 71~72, 91~92, 95~96] |
| Struc457 | M = [−50, −40, −8, 0, 15, 75], W = [7, 8, 16, 27, 31, 50, 69, 70, 72], D = [−28, −27, −26, −25, −24, −23, −22, −21, −20, −19], L2 = [−15~−14, 35~37, 55~56], |
| | L3 = [−56~−55] |
| Struc458 | M = [−81, −43, −13, 0, 3, 10, 15, 64], W = [−96, −71, −66, −54, −59, −48, −32, −31, −25, 18, 21, 26, 27, 40, 44, 45, 46, 58, 60, 69, 70], D = [−49, −20, −19, −18, 73], |
| | I1 = [−72, −71], I1 = [−26, −25], L2 = [−76~−74, −63~−62], L3 = [−28~−28] |
| Struc459 | M = [−61, −56, −36, −33, −23, −16, 0, 8, 13, 44, 59, 68], W = [−71, −70, −63, −47, −38, −28, −27, −25, −4, 9, 20, 25, 31, 76, 95, 96], D = [−10, 48], |
| | L2 = [−12~−12, 71~72, 89~90], L3 = [38~40], L4 = [62~65, 80~83] |
| Struc460 | M = [−54, −36, −30, −19, 2, 20, 41, 43, 76, 99], W = [−96, −89, −87, −77, −76, −31, −7, −6, 13, 29, 42, 45, 72, 17, 92, 93], D = [14, 69], I10 = [−99, −98], |
| | I4 = [−96, −95], I8 = [−92, −91], I5 = [34, 35], I1 = [71, 72], L8 = [60~62], L2 = [−69~−66, −62~−61, −39~−38, −14~−13, 25~26, 56~57], L4 = [−81~−80] |
| Struc461 | M = [−84, −68, −65, −23, −16, −13, −6, 0, 31, 46, 66, 71], W = [−78, −47, −28, 32, 49, 69], D = [−57, −42, −41, −40, −39, −38, −35], |
| | L2 = [22~23, 25~25, 39~40, 59~60] |
| Struc462 | M = [−61, −49, −24, 7, 24, 3, 68, 71, 73, 84, 99], W = [−71, −59, 54, 81, 82, 88, 89], D = [47, 48, 49, 50, 51, 52, 53], L2 = [−14~−13, −1~0, 65~66, 79~80], |
| | L4 = [−35~−32] |
| Struc463 | M = [−84, −56, −24, −17, 11, 30, 43, 47], W = [−98, −97, −91, −61, −58, −34, −32, −31, −13, −12, 5, 12, 14, 17], D = [−60], I8 = [−92, −91], I4 = [−88, −87], |
| | I8 = [−6, −65], |
| | I1 = [−53, −52], I1 = [−34, −3], I7 = [−21, −20], L2 = [−80~−79, −48~−48, 8~9], L3 = [−71~−69, 61~63], L4 = [−75~−75], L5 = [−43~−37, −30~−29] |
| Struc464 | M = [−58, −46, −16, −9], W = [−53, −51, −24, −20, 14, 29, 30, 31, 32], L2 = [−73~−72, −66~−65, −1~0], L4 = [−38~−35] |
| Struc465 | M = [−92, −82, −79, −74, −65, −56, −51, −13, −6, 7, 19, 25, 29, 59], W = [−89, −76, −57, −36, −27, −25, 11, 32], I2 = [−69, −88], I1 = [50, 51], L2 = [−42~−41, −1~0], |
| | L6 = [−35~−30] |
| Struc466 | M = [−95, −33, −23, −13, 0, 16, 27, 60, 15], W = [−97, −75, −61, −32, 7, 34, 69], L1 = [−54~−53], L2 = [−63~−62, 31~32, 72~73], L4 = [−74~−71] |
| Struc467 | M = [−70, −64, −55, −35, −32, −22, −3, 0, 40, 59, 62, 99], W = [−76, −72, −68, −62, −60, −41, −19, −7, 5, 61, 97], D = [−40, −39, 51], I13 = [−59, −58], I1 = [−28, −27], |
| | I3 = [93, 94], L1 = [46~48, 83~86], L2 = [−25~−24, 22~23], L3 = [−50~−50] |
| Struc468 | M = [−74, 15, 24, 29, 38, 43, 47, 55, 62, 71], W = [−95, −81, −75, −61, −7, −6, 2, 14, 45, 93], D = [−26, −17], I1 = [−21, −20], I4 = [75, 76], L1 = [−41~−39], |
| | L2 = [−51~−50, −13~−12], L4 = [−36~−36, 32~35], L5 = [87~92], L13 = [−94~−82] |
| Struc469 | M = [−50, −44, −36, −24, −10, 13, 28, 31, 59, 95], W = [−75, −70, −54, −48, −19, −18, 25, 30, 33, 38, 44, 63, 67, 87, 92, 93, 98], I11 = [−72, −71], I1 = [62, 63], |
| | I15 = [63, 64], L2 = [−63~−62, 46~48], L3 = [−32~−30, 18~20], L4 = [79~82] |
| Struc470 | M = [−61, −54, −46, −42, −28, −26, 23, 25, 31, 58, 61, 64, 89, 93], W = [−94, −81, −79, −69, −63, −39, −36, 3, 4, 53], D = [−97, −96, −87, −9], I1 = [−65, −64], |
| | L1 = [−78~−77], L2 = [−23~−23, −6~−6], L3 = [48~50, 73−15] |
| Struc471 | M = [−78, −45, −29, −18, −5, 7, 11, 20, 36, 42, 45], D = [−92, −88, −79, −77, −73, −35, −34, 5, 29, 30, 40, 64, 77], D = [−53], I1 = [−41, −40], I1 = [3, 34], |
| | I1 = [50, 51], L1 = [−98~−97], L2 = [−1~0, 69~70, 75~76] |
| Struc472 | M = [−66, −48, 36], W = [−67, −60, −55, −21, −11, −9, 6, 20, 30], I4 = [−61, −60], L2 = [−37~−36, −23~−22, −14~−13], L3 = [−31~−29] |
| Struc473 | M = [−88, −65, −61, −48, −38, −22, −18, −10, −8, 0, 14, 36, 46, 53, 60, 77, 83, 92, 96], W = [−96, −72, −7, 3, 8, 9, 10, 15, 20, 30, 34, 46, 54, 69, 73, 91], |
| | D = [−71, −70], L11 = [−34~−31], L2 = [−56~−55, 31~32], L3 = [−80~−80], L4 = [−84~−84, 22~25] |
| Struc474 | M = [−60, −33, −31, −7, 0, 22, 36, 65, 70, 76, 96], W = [−38, −35, −9, −8, −4, 5, 6, 21, 23, 25, 57, 59, 77, 85, 86, 91, 93, 94], I1 = [−53, −52], L1 = [−48~−47], |
| | L2 = [−41~−40, 39~40, 48~49, 61~62], L3 = [−26~−24, 81~83] |
| Struc475 | M = [−45, −18, −13, 11, 15, 19, 30, 33, 55, 67, 79, 91], W = [−48, −47, −42, 27, 42, 43, 54, 56, 68, 87, 88], D = [−34, 36], I1 = [39, 40], L2 = [−39~−38, 0~1, 7~8] |
| Struc476 | M = [−72, −68, −64, −60, −55, −50, −43, −9, 21, 47, 57, 73, 17], W = [−41, −40, −18, 38, 14, 81, 82, 84, 88, 89], D = [28], I2 = [40, 41], L2 = [−39~−38, 85~86], |
| | L3 = [−25~−23, 51~53], L4 = [−3~0, 33~37] |
| Struc477 | M = [−98, −68, −58, −41, −8, 42, 45], W = [−92, −78, −77, −65, −48, −27, 14, 17, 30, 33, 50, 51], D = [28, 29], I2 = [24, 25], L2 = [−64~−63, −1~0], |
| | L3 = [−91~−89, −38~−37] |
| Struc478 | M = [−91, −86, −82, −71, −34, −26, −14, 0, 10, 17, 27, 41, 43], W = [−87, −68, −59, −58, −49, −32, −31, −21, −8, 9, 31, 35], I1 = [−68, −67], I4 = [−62, −61], |
| | L8 = [−79~−74], L1 = [−43~−40], L2 = [−51~−50, 22~23] |
| Struc479 | M = [−76, −36, −33, −28, −26, 0, 4, 31, 56, 60, 85], W = [−77, −45, −24, −23, 8, 12, 32, 44, 45, 66, 76], D = [−17, −16, 27], I1 = [32, 33], I1 = [67, 68], L2 = [63~65], |
| | L4 = [−72~−70] |
| Struc480 | M = [−69, −61, −56, −36, −18, −11, 5, 13, 29, 39, 44, 47, 59], W = [−67, −63, −60, −42, −39, −27, −26, −17, −10, −4, 9, 20, 48, 61, 14, 76, 94, 100], D = [−41, −40], |
| | L2 = [−73~−72, −33~−32, 21~22, 88~89], L3 = [−24~−23, 63~65], L4 = [80~83] |
| Struc481 | M = [−44, −30, −26], W = [−41, −40, −14, 20, 32], D = [−17, 35], I1 = [−63, −62], L2 = [−66~−65, 30~31], L3 = [21~23], L5 = [0~4], L7 = [−61~−59] |
| Struc482 | M = [−73, −61, −49, −32, −28, −14, −11, 0, 12, 18, 27], W = [−50, −27, −19, −18, −7, 46], L2 = [21~22], L5 = [37~39] |
| Struc483 | M = [−86, −76, −39, −37, −25, −7, 0], W = [−88, −87, −55, −49, −40, −26, −8, −5, 5], I2 = [−95, −94], I3 = [−49, −48], L1 = [−82~−81, −64~−57] |
| Struc484 | M = [−78, −71, −67, −51, −14, 18, 59, 93], W = [−99, −97, −96, −95, −89, −82, −14, −73, −43, −38, −31, −26, 20, 33, 38, 88, 92, 100], D = [69], I3 = [−84, −83], |
| | I1 = [−64, −63], I3 = [44, 45], L2 = [−61~−60, −7~−6, 6~7, 86~87], L3 = [−94~−94, −81~−81] |
| Struc485 | M = [−87, −80, −65, −22, 6, 26, 66, 75], W = [−75, −72, −31, 15, 18, 21, 45, 59, 60, 74], L2 = [−97~−96, −77~−76, −61~−60, −25~−28, 13~14, 22~23], L3 = [31~33], |
| | L4 = [−49~−45] |
| Struc486 | M = [−66, −59, −28, 38, 40, 51, 55, 59], W = [−72, −60, −24, 7, 23, 39, 67, 69, 71], D = [14, 15, 63], L2 = [−32~−31, −1~0, 26~27, 31~32] |
| Struc487 | M = [−93, −83, 0, 15, 36], W = [−80, −77, −57, −56, −33, −17, −13, 13, 45], D = [47], I3 = [−46, −45], I1 = [49, 50], L2 = [−61~−50, −36~−35, 10~11], L4 = [58~61], |
| | L5 = [−72~−68, −14~−14], L7 = [−28~−22], L11 = [22~23] |
| Struc488 | M = [−87, −71, −31, −20, −8, 2, 4, 10, 40, 70, 72, 76], W = [−74, −72, −60, −54, −45, −40, −13, 19, 22, 23, 24, 31, 55, 69], D = [−12, 13, 14], I1 = [−49, −48], |
| | I1 = [−45, −44], I1 = [−16, −15], L2 = [−97~−96, −63~−62, 17~18], L3 = [−36~−34] |
| Struc489 | M = [−92, −87, −73, −65, −19, −16, −6, 8, 37, 41, 73, 85, 89], W = [−86, −82, −80, −68, −61, −60, −39, −38, −37, −36, −7, 4, 38, 45, 75, 83], D = [25], L1 = [18~20], |
| | L2 = [46~47, 61~62, 81~82], L3 = [−70~−69], L4 = [−14~−11, 0~3] |
| Struc490 | M = [−82, −59, −24, 0, 13, 32], W = [−92, −91, −77, −56, −55, 29, 67], D = [−2], I1 = [−40, −39], I11 = [56, 57], L2 = [−88~−87, −79~−78, −48~−47, −35~−34, 5~6, 9~10, |
| | 65~66], L4 = [41~42], L5 = [49~50] |
| Struc491 | M = [−98, −71, −31, −14, −6, 0, 7, 26, 36, 39, 86, 95], W = [−95, −82, −74, −69, −43, −38, −37, −36, −26, 3, 4, 20], D = [−91, 45], I1 = [−64, −63], I4 = [47, 48], |
| | L1 = [−85~−83], L2 = [−79~−76, −61~−60, 58~59] |
| Struc492 | M = [−73, −70, −46, −43, −40, −34, −32, −16, 5, 28, 40, 63, 12, 84], W = [−77, −76, −61, −56, −10, 62, 95], L2 = [22~23, 30~31, 57~58, 74~75] |
| Struc493 | M = [−90, −66, −63, −57, −39, −34, −26, −21, −13, −3, 5, 7, 38, 46], W = [−92, −87, −86, −84, −71, −41, −19, 27, 37, 39, 49], L3 = [−81~−79] |
| Struc494 | M = [−96, −92, −78, −61, −23, 74, 78, 83, 90, 95], W = [−73, −69, 65, −64, −52, −16, −10, −7, 3, 9, 21, 34, 36, 41, 62], D = [−19], I1 = [−17, −16], I14 = [33, 34], |
| | I15 = [34, 35], I15 = [35, 36], I14 = [36, 37], I12 = [38, 39], I15 = [40, 41], I9 = [21, 42], L1 = [−87~−84, 67~68], L2 = [−1~0, 7~8, 54~55], L3 = [−36~−34, 62~64], |
| | L4 = [−44~−41] |
| Struc495 | M = [−75, −68, −59, −43, −31, −26, −3, 0, 7, 32, 35, 47, 60, 64, 68, 73, 82, 86, 95, 98], W = [−69, −25, −20, −4, 63, 66, 75, 83], D = [27], I1 = [29, 30], |
| | L2 = [−14~−13, 39~40], L3 = [−72~−70], L5 = [52~56] |
| Struc496 | M = [−76, −65, −52, −43, −25, 10, 16, 24, 28, 32, 41], W = [−56, −50, −48, −31, −23, −21], L8 = [−13~−13], L2 = [−54~−54], L3 = [−62~−59, 0~2, 36~38] |
| Struc497 | M = [−46, 9, 45, 65, 71], W = [−52, −19, −18, −9, −8, 8, 17, 18, 22, 31, 32, 43, 53, 12], D = [48, 69], I1 = [50, 51], L1 = [−33~−31], L2 = [26~27], L3 = [−3~−1, 61~63], |
| | L5 = [−41~−38] |
| Struc498 | M = [−97, −87, −79, −69, −44, −25, −22, −19, 12, 16, 35, 41, 61, 83, 88, 98], W = [−94, −64, −62, −47, −32, 32, 40, 60, 76, 96], D = [28, 29, 30, 31], I1 = [−90, −89], |
| | I2 = [20, 21], I1 = [21, 22], L3 = [54~58] |
| Struc499 | M = [−63, −57, −46, −32, 13, 73, 78, 87], W = [−52, −51, −36, −28, −19, −18, 3, 25, 26, 30, 31, 59, 75, 85], D = [−24, −23, 22, −21, −10, 20], I1 = [−13, −12], |
| | I1 = [22, 23], L1 = [47~49], L2 = [−35~−35, −1~0, 55~58, 61~62, 97~98], L3 = [−74~−72], L4 = [−41~−38] |
| Struc500 | M = [−97, −62, −57, −44, −32, −25, −22, 20, 24, 56, 75, 87, 92, 95, 97], W = [−87, −86, −24, −6, 12, 22, 80, 94], I1 = [41, 42], L2 = [−93~−92, −65~−64, −1~0, 52~53], |
| | L3 = [−89~−89, 30~32] |
| Struc501 | M = [−84, −58, −35, −11, 17, 20, 49, 65, 73], W = [−78, −77, −75, −74, −71, −65, −45, −23, 40, 51, 70, 80], I12 = [−45, −44], I1 = [29, 30], L8 = [−51~−48], |
| | L2 = [−1~0, 34~35, 60~61] |
| Struc502 | M = [−69, −57, −52, −50, −41, −32, −20, −18, −13, −3, 0, 17, 29], W = [−93, −92, −89, −9, −7, 5, 7, 12, 37, 38, 47, 55], D = [44, 45], L1 = [−81~−80], |
| | L2 = [−77~−77, −35~−34] |
| Struc503 | M = [−61, −48, −41, −38, −36, −7, 10, 43, 49], W = [−43, −29, −27, −18, −9, 3, 47, 55, 56, 61], D = [−70, −69], I7 = [−78, −77], I1 = [30, 31], L2 = [25~27], L3 = [0~2] |
| Struc504 | M = [−73, −55, −41, −28, −17, −12, −5, 1, 13, 20, 34, 36, 43, 54, 59, 94, 99], W = [−90, −84, −81, −78, −40, −23, −22, −16, −10, 17, 27, 31, 32, 56, 76, 91], D = [−4], |
| | I1 = [−86, −85], I1 = [27, 28], I1 = [40, 41], I10 = [90, 91], L2 = [−80~−79, −67~−63, 65~66], L3 = [−50~−48], L4 = [6~9] |
| Struc505 | M = [−18, −14, −2, 0, 13, 55, 59, 69, 76], W = [−31, −13, −8, −6, 26, 30, 67, 71, 72], D = [27, 48], I1 = [32, 33] |
| Struc506 | M = [−72, −44, −14, 14, 31], W = [−98, −76, −70, −43, −32, −28, −18, −17, 28], D = [−97, −96, −95, −94, −93, −92, −91, −90, −89, −88, −87, −86], I1 = [−5, −4], |
| | L2 = [−62~−61, −38~−37, −31~−30, −9~−9, −1~0] |
| Struc507 | M = [−60, −40, 5, 8, 16, 40, 63, 72], W = [−61, −11, 12, 73, 95], I1 = [51, 52], L2 = [−50~−49, −1~0, 22~23, 30~31] |
| Struc508 | M = [−64, −59, −30, 10, 53], W = [−96, −93, −89, −36, −24, −23, −20, −8, 26, 31, 32, 33], D = [−82, 17, 42], I1 = [14, 15], I1 = [45, 46], I5 = [65, 66], L9 = [−79~−79], |
| | L2 = [−95~−94, −91~−90, −88~−88, −39~−37, −7~−6, −4~−3, 27~28], L3 = [−14~−72, −69~−69, −66~−56], L1 = [−56~−46] |
| Struc509 | M = [−63, −39, −13, 5, 7, 12, 17, 58], W = [−56, −51, 28, 34, 36, 38, 49, 55, 59], D = [−89, −26], I1 = [−93, −92], I1 = [−25, −24], I14 = [35, 36], I6 = [37, 38], |
| | I1 = [46, 47], L2 = [29~30], L3 = [40~41, 52~54], L4 = [−81~−78, −3~0] |
| Struc510 | M = [−72, −70, −52, −50, −5], W = [−92, −86, −69, −63, −55, −53, −46, −41], D = [−98, −11, −10, −9, −8], I2 = [−91, −90], I11 = [0, 1], L1 = [−96~−95, −15~−14], |
| | L2 = [−45~−44, −24~−23], L9 = [−61~−81] |
| Struc511 | M = [−72, −55, −50, −32, −26, −11, 5], W = [−88, −81, −76, −66, −56, −39, −9, −8, 2, 15], I1 = [−5, −4], L2 = [−63~−62, −42~−41, −38~−37, −1~0] |
| Struc512 | M = [−64, −23, −13, 0, 27, 71], W = [−28, −9, 7, 10, 11, 21, 42, 48, 69, 70], D = [−49], L2 = [−69~−68, −60~−59, 31~32, 75~76] |
| Struc513 | M = [−18, −1, 7, 16, 42, 47, 50, 53, 81], W = [−48, −43, −42, −15, 6, 8, 61, 99], D = [−31, −30], I1 = [28, 29], L2 = [−45~−44, −38~−37, −26~−25], L3 = [34~35], |
| | L4 = [−11~−8] |
| Struc514 | M = [−23, −14, 6, 10, 26, 53, 65, 80, 95], W = [−16, −11, 9, 17, 18, 33, 51, 59, 71, 82, 89], D = [23], I5 = [−7, −6], I1 = [20, 21], I3 = [40, 41], I15 = [42, 43], |
| | I2 = [50, 51], L8 = [−39~−39], L1 = [60~61], L2 = [−30~−29, −1~0, 31~32, 38~39], L3 = |
| | [75~17, 90~92] |
| Struc515 | M = [−89, −76, −60, −52, −18, 16, 28, 32], W = [−48, −21, 8], I1 = [1, 2], L2 = [−57~−56, −47~−46], L4 = [23~24, 35~36, 39~40] |
| Struc516 | M = [−3, 18, 44], W = [−16, −15, −14, 4, 9, 22, 25, 32, 35, 61, 78, 79, 96], D = [−9], I1 = [−6, −5], L2 = [30~31, 38~39, 93~94], L3 = [4~6, 70~12] |
| Struc517 | M = [−38, −33, −30, −7, 0, 2, 6, 9, 38, 43, 64, 71], W = [−53, −51, −49, −5, 4, 15, 21, 25, 95], D = [92, 93, 94], I4 = [−49, −48], I1 = [27, 28], L2 = [30~33, 85~86], |
| | L3 = [82~83], L5 = [−25~−22] |
| Struc518 | M = [−97, −88, −84, −43, −40, −30, −21, −6, 0, 28], W = [−19, −33, −26, −9, −8], I10 = [34, 35] |
| Struc519 | M = [−10, 0, 2, 20, 65, 96], W = [−12, 36, 68, 70, 94], D = [33, 34, 82, 83, 84, 85, 86, 87, 88, 89], I2 = [47, 48], I1 = [67, 68], L2 = [44~45], L3 = [28~29, 55~57] |
| Struc520 | M = [−19, −11, −8, 0, 14, 20, 36, 51, 54, 64, 71, 78, 89], W = [−18, −17, −7, 31, 14, 85, 86, 87], D = [−4], L1 = [6, 7], L2 = [43~44] |
| Struc521 | M = [−22, −6, 0, 2, 6, 9, 19, 23, 38, 41, 48, 63, 92, 95], W = [−40, −37, 7, 22, 36, 40, 47, 51, 53, 82, 83, 98], I1 = [−36, −35], I1 = [13, 14], L2 = [−29~−28, 32~33], |
| | L3 = [85~87], L5 = [74~78] |
| Struc522 | M = [−58, −55, −53, −43, −40, −13, 7, 22, 27, 37, 50, 63, 73, 80, 87], W = [−49, −36, 8, 18, 19, 28, 29, 39, 45, 69, 14, 82, 85], D = [93, 94], I1 = [85, 86], |
| | L1 = [−63~−62], L2 = [−35~−34, −24~−23, −6~−5, 70~71] |
| Struc523 | M = [0, 18, 31, 54, 56, 59, 70, 72, 94, 97], W = [9, 35, 36, 78, 79, 81], D = [8], I1 = [5, 6], L3 = [37~39] |
| Struc524 | M = [−14, −8, 20, 26, 32, 51, 73, 78, 95], W = [−18, −17, −10, 17, 31, 33, 56, 64, 74, 85, 86], D = [−6], I1 = [6, 7], I1 = [83, 84], L2 = [35~36, 87~89], L4 = [42~44] |
| Struc525 | M = [21, 32, 61], W = [−15, 2, 19, 29, 30, 34, 35, 53, 54], D = [−14, −11], I2 = [−8, −7] |
| Struc526 | M = [−11, −8, 10, 20, 51, 54, 58, 64, 71, 78, 89], W = [−17, 27, 74, 76, 85, 86, 87], D = [−4], I3 = [−18, −17], I1 = [6, 7], L2 = [43~44] |
| Struc527 | M = [−43, −39, −33, 13, 47, 53, 56, 61, 67, 76, 80], W = [−73, −72, −70, −67, −49, −45, −18, −14, −13, −12, −11, 2, 11, 12, 29, 32, 35, 46, 55, 68, 72, 82], |
| | D = [−61, −60, −59, 18], I5 = [−26, −25], I1 = [−18, −17], I3 = [34, 35], L2 = [−6~−5, 96~97], L3 = [88~90] |
| Struc528 | M = [−9, 0, 6, 19, 39, 73, 75], W = [−17, −16, −11, 7, 27, 32, 33, 41, 42, 44, 55, 85, 99], D = [97], L2 = [−13~−12, 49~50, 80~81], L3 = [34~36] |
| Struc529 | M = [−86, −42, −8, 0, 2, 10, 14, 17, 22, 36, 50, 78], W = [−91, −35, −23, −22, −10, −9, −4, 6, 8, 34, 51, 66, 67, 73], D = [−66, −65, −64, 69], L1 = [−60~−58], |
| | L2 = [−78~−77, −46~−45, 25~26], L6 = [−55~−52] |
| Struc530 | M = [3, 8, 38, 58], W = [17, 25, 43, 44, 54, 64, 69, 70, 81, 92, 95], I1 = [−8, −7], I4 = [29, 30], L2 = [46~47, 51~52], L12 = [32~33] |
| Struc531 | M = [−6, 6, 10, 35, 42, 57, 61, 96], W = [−9, 39, 92, 93], D = [84], L2 = [80~81], L3 = [28~30] |
| Struc532 | M = [−26, −12, −3, 2, 6, 36, 63], W = [−52, −15, −10, −9, 7, 25, 46, 47, 74, 75, 78, 82, 85, 89], D = [79, 80, 81], I2 = [89, 90], L2 = [−39~−38, −29~−28, 17~18], |
| | L3 = [−45~−43, 29~30], L6 = [−54~−54] |
| Struc533 | M = [−18, 0, 62, 64, 69, 72, 78], W = [−33, 6, 7, 8, 19, 33, 38, 83], L1 = [−23~−22], L2 = [49~50], L3 = [30~32], L5 = [−13~−12] |
| Struc534 | M = [−66, −51, −43, −38, −21, −16, −10, 22, 45, 69, 72], W = [−92, −40, −33, −23, −22, −17, −4, 16, 17, 33, 39, 41, 42, 54, 66, 71], D = [62], I1 = [4, 5], |
| | L1 = [−90~−88, −80~−78], L2 = [−97~−96, −30~−29, 6~7, 77~78], L3 = [34~36] |
| Struc535 | M = [8, 30, 36, 51, 65, 69, 72, 77, 94], W = [−6, 16, 31, 44, 52, 53, 62], D = [55], I4 = [−16, −15], I1 = [48, 49], L2 = [−9~−8, 60~61], L3 = [38~40] |
| Struc536 | M = [−37, −13, −3, 0, 17, 22, 26, 57, 77, 92], W = [−43, −24, −10, −9, −4, 6, 10, 16, 39, 41, 42, 53, 53, 64, 71, 74, 79, 80, 82], D = [−56, −32, −20], I2 = [−43, −42], |
| | I1 = [−28, −27], I1 = [67, 68], L1 = [−49~−47], L2 = [8~9, 29~30, 34~35] |
| Struc537 | M = [5, 15, 30, 52, 69, 93], W = [34, 35, 43, 44, 49, 76, 77, 87, 88, 100], L2 = [74~75, 84~85], L3 = [36~38] |
| Struc538 | M = [4, 12, 30, 52, 59], W = [43, 44, 49, 53, 55, 61, 76, 77, 82, 87, 88, 100], L1 = [46~48], L2 = [15~16, 37~38, 74~75, 84~85] |
| Struc539 | M = [−15, 61], W = [−10, −5, 32, 37, 92, 97, 98], D = [85, 86], I1 = [−10, −9], I7 = [39, 40], I9 = [43, 44], I15 = [44, 45], I1 = [80, 81], L1 = [69~70], L2 = [−1~0], |
| | L3 = [32~33, 93~95], L7 = [27~30] |
| Struc540 | M = [−41, −38, −31, −19, 0, 54, 59, 63, 67, 71], W = [−95, −82, −50, −15, −14, −7, 2, 6, 11, 23, 32], D = [−86, −85, −84, −83], I1 = [22, 23], I1 = [46, 47], L1 = [26~28], |
| | L2 = [33~36], L3 = [−75~−73], L5 = [−89~−89] |
| Struc541 | M = [−89, −78, −29, −26, −16, −6, 23, 35, 54, 88, 92, 98], W = [−96, −81, −61, −52, −51, −37, −32, −27, −22, 30, 33, 47, 61, 67], D = [31, 32, 41], I2 = [8, 9], |
| | I2 = [43, 44], L2 = [−74~−73, −50~−49, −43~−42, −1~0, 11~12, 37~38, 68~70], L3 = [75~76] |
| Struc542 | M = [−96, −79, −77, −61, −43, −40, 0, 3, 11, 25, 40, 47, 84, 94], W = [−98, −76, −70, −59, −37, −31, −27, −17, −15, −14, −9, −8, 19, 28, 37, 46, 56, 61, 99], |
| | I1 = [71, 72], I6 = [91, 92], L2 = [−93~−92, −19~−18, 59~60], L3 = [30~32] |
| Struc543 | M = [−70, −54, −33, −29, −15, 0, 2, 30, 37, 40, 80], W = [−97, −93, −82, −78, −69, −52, −49, −30, −4, −2, 11, 12, 24, 25, 57, 88, 89, 94], D = [6], I11 = [−83, −82], |
| | I3 = [−63, −62], I1 = [−61, −60], I1 = [−5, −4], L1 = [−9~−8], L2 = [−77~−76, −20~−19, 51~52, 72~73, 96~97], L4 = [−40~−37] |
| Struc544 | M = [−50, −33, −12, −9, 0, 41, 55, 61], W = [−66, −54, −47, −20, −15, −5, 9, 21, 28, 45, 52, 67], D = [31], I1 = [12, 13], I1 = [34, 35], L2 = [−22~−21, 23~24], |
| | L3 = [−64~−63, −57~−55, −29~−27], L4 = [−60~−60], L5 = [3~8] |
| Struc545 | M = [−10, 0, 6, 8, 12, 26, 30, 38], W = [−3, 3, 4, 13, 17, 18, 20, 35, 66], L2 = [49~50], L4 = [56~59] |
| Struc546 | M = [−93, −45, −5, 0, 5, 12, 19, 38, 48, 52, 60, 64, 88, 96], W = [−72, −64, −62, −58, −50, −49, −27, 2, 3, 4, 6, 7, 18, 46, 47, 84, 86, 87], |
| | D = [−80, −79, −32, −31, −30, 92, 93], I2 = [−26, −25], L2 = [−70~−69, −57~−56, −37~−36, −10~−9, 30~31, 77~78], L3 = [−84~−84, −75~−73] |
| Struc547 | M = [−97, −94, −86, −83, −75, −28, −23, 0, 7, 10, 12, 17, 29, 34, 38, 57, 70, 74, 77, 91], W = [−99, −91, −90, −67, −47, −46, −35, −30, 3, 8], D = [86, 87, 88], |
| | L1 = [−66~−62], L2 = [−38~−37], L3 = [49~51, 78~80] |
| Struc548 | M = [−61, −55, −6, 12, 24, 42, 47], W = [−97, −86, −82, −70, −67, −32, −31, −29, −16, −2, 14, 16, 44, 52], D = [−81, −80, −79], I3 = [−71, −70], I1 = [−46, −45], |
| | I5 = [−30, −29], I1 = [56, 57], L2 = [7~8], L4 = [−37~−35] |
| Struc549 | M = [−9, 2, 8, 32, 40, 89], W = [−97, −66, −64, −41, −39, −31, −23, −4, 6, 11, 12, 34, 46, 64, 73, 82, 84, 86, 90, 93, 97], |
| | D = [−86, −85, −84, −83, −82, −81, −80, −79, −78, −77, 73, 99], I6 = [−37, −36], I15 = [−33, −32], I11 = [−32, −31], I13 = [94, 95], L1 = [−69~−68, −62~−60], |
| | L2 = [−94~−93, −5~−5, 59~60, 65~67], L3 = [−43~−42, −26~−26, −17~−17, 46~48, 51~55], L4 = [−20~−20, 75~60], L8 = [−13~−13], L10 = [−53~−48] |
| Struc550 | M = [−67, −64, −56, −19, −14, 0, 2, 4, 7, 14], W = [−61, −54, −51, −27, −22, −15, 52, 99], D = [42, 43, 44, 45, 46, 47, 48, 49, 50, 51, 53, 54, 55, 56, 57, 58, 59, |
| | 60, 61, 62, 63, 64, 65, 66, 68, 59, 70, 71, 72, 73, 74, 75, 76, 77, 78, 79, 80, 81, 84, 85, 86, 87, 88, 89, 90, 91, 92, 93, 94, 95, 96, 97, 98], I2 = [−8, −7], |
| | L2 = [−24~−23] |
| Struc551 | M = [−50, −20, 4, 11, 13, 20, 42, 53, 56, 90], W = [−70, −68, −59, −58, −57, −34, −23, −4, −3, 3, 16, 32, 33, 39, 62, 78], D = [−55, −9, 0, 71], I1 = [−60, −59], |
| | L2 = [6~7, 30~31, 97~98], L3 = [81~83], L4 = [33~34, 63~65], L5 = [−13~−12] |
| Struc552 | M = [−96, −86, −69, −42, −35, −11, −6, 0, 8, 66], W = [−95, −91, −90, −88, −76, −75, −52, −51, −47, −46, −29, −20, −19, 3, 53, 74, 15], D = [35, 36, 37, 38], |
| | I15 = [23, 24], L2 = [−80~−78, −31~−30, 4~5, 51~52, 87~88], L3 = [60~62], L7 = [18~20] |
| Struc553 | M = [−18, 0, 12, 21, 26, 28, 49, 56], W = [−9, 3, 13, 20, 61, 66], L2 = [4~5, 58~59], L5 = [−8~−4] |
| Struc554 | M = [−74, −67, −61, −49, −35, −31, −15, −10, 3, 14, 24, 59, 61, 71, 91, 97], W = [−86, −70, −56, −48, −47, −40, −39, −37, 18, 33, 34, 64], I15 = [29, 30], I12 = [33, 34], |
| | I2 = [42, 43], L3 = [−83~−83] |
| Struc555 | M = [−97, −94, −58, −29, −14, 0, 2, 8, 15, 27, 45, 57], W = [−98, −61, −41, −40, −6, 31, 53, 54, 56], D = [−77, −76], I1 = [−70, −69], I14 = [−35, −34], |
| | L2 = [−85~−83, −72~−72, −65~−64, 11~12, 60~61], L5 = [−49~−45] |
| Struc556 | M = [−37, 0, 3, 24, 29, 86], W = [−70, −64, −15, −8, −7, 2, 10, 33, 37, 48, 70], D = [−81, −26, −25], I2 = [−77, −76], I1 = [88, 89], L2 = [−69~−68, −63~−52, −40~−39], |
| | L3 = [−58~−55, −14~−12, 45~47] |
| Struc557 | M = [−56, −34, 17, 22, 39, 51, 59], W = [−90, −89, −82, −78, −38, −27, 7, 8, 28, 42, 43, 54], D = [−75, −74, −73, −72, −46, 41], I1 = [−64, −63], I1 = [−44, −43], |
| | I3 = [32, 33], L2 = [−98~−97, 12~13, 29~30] |
| Struc558 | M = [−97, −88, −5, 0, 2, 12, 37, 55], W = [−83, −47, −37, −16, −6, 11, 16, 17, 39, 44, 48, 49], I1 = [−65, −54], L2 = [−91~−90, −62~−50, −30~−29, 41~42], L5 = [−78~−74] |
| Struc559 | M = [−58, −52, −33, −29, −4, 0], W = [−49, −23, −14, −5, 6, 7, 28, 65, 66], D = [−8, 23, 78, 79, 92], I1 = [19, 20], I2 = [82, 83], L1 = [46~54], |
| | L2 = [−68~−67, 37~38, 88~89], L3 = [−48~−48, −12~−11, 9~11], L4 = [69~72] |
| Struc560 | M = [−29, −24, 0, 9, 53, 60], W = [−14, 3, 24, 52, 65, 69], D = [−13, −12, −11, 18, 19], I1 = [−16, −15], I1 = [−8, −7], I1 = [−5, −4], L1 = [−35~−34, 12~14], |
| | L2 = [−40~−39, −20~−20, 38~39] |
| Struc561 | M = [−88, −83, −49, −39, −35, −29, 0, 7, 10, 43, 61, 66, 70, 80], W = [−99, −67, −47, −46, −45, −44, −34, −21, 41, 48], D = [−61, −60, −59, −58, 21, 22, 75], |
| | I3 = [92, 93], I3 = [98, 99], L1 = [87~88], L4 = [29~32] |
| Struc562 | M = [−61, −55, −47, −10, −4, 0, 3, 20, 72], W = [−75, −59, −49, −24, −23, −18, −14, −8, 52], I1 = [25, 26], I1 = [28, 29], I3 = [31, 32], I4 = [28, 49], I1 = [53, 54], |
| | I1 = [55, 56], I3 = [66, 67], L1 = [−87~−85], L2 = [−79~−76, −72~−72, −37~−36, 44~45], L3 = [8~10] |
| Struc563 | M = [−87, −78, −70, −39, −37, −29, −19, −11, −6, 2, 7, 25, 31, 34, 58, 76, 92], W = [−81, −71, −69, −59, −13, 9, 39, 52, 54, 55, 60], L2 = [97~98], L3 = [47~49], |
| | L5 = [54~66] |
| Struc564 | M = [−88, −65, −23, 0, 6, 47, 64, 89], W = [−76, −64, −43, −42, −26, −9, −7, 2, 3, 7, 8, 18, 28, 32, 45, 52, 53, 66, 68, 78, 83, 84, 91, 92], D = [29, 30, 31], |
| | I9 = [−93, −92], I10 = [−70, −69], L2 = [−47~−46, −16~−15, −12~−11, 75~76, 79~80], L4 = [−61~−59], L5 = [−34~−30] |
| Struc565 | M = [−54, −28, −6, 12, 16], W = [−16, −15, 8], D = [−74, 33], I1 = [−78, −77], I1 = [−34, −33], I1 = [31, 32], L3 = [−89~−87, −52~−61], L4 = [43~46] |
| Struc566 | M = [−94, −87, −83, −42, −16, 17, 22, 29, 42], W = [−93, −80, −67, −47, 7, 15, 16, 52, 54], I1 = [−72, −71], L1 = [−33~−31], L2 = [8~9, 55~56], L3 = [45~47], |
| | L4 = [−64~−62], L8 = [−26~−26] |
| Struc567 | M = [−25, 0, 5, 12, 14, 36, 50, 52, 67, 72], W = [−31, −14, 8, 17, 21, 27, 30, 69, 70], I12 = [42, 43], L2 = [33~34, 58~59], L4 = [−32~−32], L14 = [39~40] |
| Struc568 | M = [−41, −29, −16, 0, 12, 14, 50], W = [−69, −67, −48, −37, −6, 51, 57], D = [25], I3 = [−49, −48], I2 = [−46, −45], L2 = [7~8, 43~44, 61~62], L5 = [−66~−63], |
| | L7 = [−56~−52] |
| Struc569 | M = [−40, −24, −22, 0, 2, 5, 21, 31, 38, 48, 50, 79], W = [−46, −43, −17, −14, −13, −6, 12, 16, 33, 59, 96], I1 = [24, 25], L1 = [−10~−9], L3 = [−36~−33] |
| Struc570 | M = [−92, −22, −16, −8, −4, 0, 9, 27, 41], W = [−91, −90, −89, −36, −30, −11, −10, 20, 32, 33, 36, 67, 85], D = [−41, −40], L1 = [−55~−51, 23~25], L2 = [−67~−60, 62~63], |
| | L3 = [−77~−75, 56~58], L4 = [−31~−31], L6 = [−85~−81] |
| Struc571 | M = [−58, −52, −42, −34, −29, −17, −11, −8, −4, 9, 20, 32, 42, 46, 89], W = [−57, −35, −26, −25, −21, −18, −14, −10, −3, 6, 7, 29, 66, 70, 92], I1 = [−48, −47], |
| | L1 = [52~54, 62~65], L2 = [−20~−19, 71~72], L4 = [81~84] |
| Struc572 | M = [−28, −19, −14, −5, 0, 4, 12, 19, 28, 57, 66, 12, 78, 88], W = [−50, −49, −41, −29, 2, 50, 63, 84, 86, 95, 96], D = [−69, −60], I1 = [−64, −63], I4 = [32, 33], |
| | L1 = [−84~−82], L2 = [−94~−93, −56~−55], L4 = [−79~−79, −11~−8], L5 = [44~49] |
| Struc573 | M = [0, 4, 10, 43, 55, 85, 98], W = [2, 25, 33, 49, 57, 58, 69, 72, 78, 94, 96], I4 = [6, 7], I1 = [30, 31], I6 = [33, 34], L2 = [14~15, 45~46], L3 = [50~52], |
| | L5 = [−6~−6] |
| Struc574 | M = [−39, −31, −5, 23, 27], W = [−44, −38, −11, −8, −7, 6, 22, 40, 48, 56], D = [−14], I1 = [5, 6], I1 = [57, 58], L2 = [−43~−42, −10~−10, 60~61], L3 = [43~46], |
| | L5 = [−23~−19], L7 = [50~55] |
| Struc575 | M = [−87, −82, −65, −56, −30, −14, 0, 2, 33, 62, 65, 80], W = [−88, −85, −68, −67, −55, −24, −22, −8, 12, 32, 67, 69], D = [−37, −20, 24, 25], I1 = [−97, −96], |
| | I1 = [−41, −40], L2 = [−95~−94], L3 = [45~47] |
| Struc576 | M = [−10, 0, 6, 8, 26, 38, 49], W = [17, 18, 35, 66, 67], L2 = [−25~−24, 30~31], L4 = [56~59] |
| Struc577 | M = [−95, −77, −61, −22, 8, 10], W = [−62, −59, −24, −14, −11, −6, 30], D = [−69, −31], I1 = [−34, −33], I1 = [−26, −25], L2 = [−49~−49, −16~−15, −10~−8, 17~18], |
| | L3 = [−86~−84], L4 = [−66~−64, −55~−54] |
| Struc578 | M = [−29, −17, −8, 11, 20, 30, 35, 37, 47, 56, 78, 85, 98], W = [−96, −82, −78, −77, −69, −23, −2, 24, 48, 49, 88, 89, 99], D = [72], I2 = [−82, −81], I2 = [−78, −77], |
| | L2 = [−62~−61, 44~45, 60~61], L4 = [−40~−37] |
| Struc579 | M = [−58, −41, −29, −17, −8, 0, 9, 20, 32, 36, 78, 89, 93], W = [−51, −49, −40, −21, −20, −14, −10, 6, 7, 14, 27, 65, 70, 92], D = [−3, 16], I1 = [−5, −4], I2 = [52, 53], |
| | L1 = [58~59], L2 = [−68~−67, 25~26, 71~72, 81~82], L3 = [−48~−48], L4 = [25~46] |
| Struc580 | M = [0, 18, 30, 89], W = [16, 36, 39, 46, 55, 64, 70, 71, 14, 80], D = [37, 38], L1 = [66~67], L2 = [6~7, 44~45, 58~59, 62~63], L3 = [25~27] |
| Struc581 | M = [−61, −37, 3, 25, 56, 97], W = [−95, −91, −87, −83, −58, −42, −40, −27, −20, −14, −5, 13, 48, 100], I1 = [71, 72], L2 = [−77~−77, −71~−70, 60~61], L3 = [88~90], |
| | L4 = [44~47] |
| Struc582 | M = [−32, −15, −11, 2, 17, 19, 65, 75, 96, 99], W = [−96, −81, −51, −46, −17, 4, 5, 6, 7, 9, 14, 15, 59, 65, 67, 84, 88, 92], D = [4], I15 = [−52, −51], I2 = [−51, −50], |
| | I14 = [−46, −45], I1 = [82, 83], I6 = [84, 85], I15 = [86, 87], L1 = [39~41], L3 = [−60~−59], L4 = [−65~−65, 30~33], L5 = [−73~−71], L6 = [52~57] |
| Struc583 | M = [−36, −15, −11, 0, 13, 49, 53, 75, 80, 49], W = [−96, −95, −81, −54, −53, −52, −40, −39, −18, −17, 4, 9, 50, 59, 67, 85, 89], I3 = [−54, −53], I4 = [−46 −45], |
| | I9 = [92, 93], I12 = [96, 97], L10 = [29~30], L1 = [40~41, 65~66], L2 = [−49~−48, −31~−30], L7 = [−73~−71, −67~−65, 17~19] |
| Struc584 | M = [−91, −71, −39, −37, 0, 7, 10, 29, 34, 35, 54, 70], W = [−99, −67, −47, −43, −36, −30, −27, −15, −14, 8, 17, 24, 25, 28, 41, 42, 48, 72, 82], |
| | D = [−65, −64, −53, −62, −61, −60, −59, −58, −57, −56], L1 = [87~88], L2 = [73~74, 79~80], L3 = [−51~−49] |
| Struc585 | M = [−61, −36, −29, −24, −21, 10, 12, 31, 39, 60], W = [−79, −57, −41, −28, −9, 3, 7, 17, 20], I6 = [−80, −79], I5 = [−67, −66], I15 = [−57, −56], I15 = [−56, −55], |
| | L2 = [45~46, 53~54], L3 = [−90~−88, −7~−5], L4 = [−47~−47], L5 = [−73~−73], L8 = [−51~−51] |
| Struc586 | M = [−22, −10, 0, 6, 12, 26, 30, 41, 45, 49, 56, 58, 65], W = [3, 4, 17, 18, 20, 35, 66], L2 = [−25~−24], L3 = [36~38] |
| Struc587 | M = [−22, −18, −14, −10, 0, 3, 8, 51, 58, 80, 91, 96], W = [−5, −4, 9, 16, 20, 30, 69, 90], D = [75, 76, 77], I11 = [37, 38] |
| Struc588 | M = [−88, −83, −75, −10, −5, 0, 2, 12, 15, 79], W = [−99, −82, −68, −67, −66, −48, −12, 7, 31, 64, 78, 82], D = [−61, −41, −40], I12 = [−68, −67], I15 = [−67, −66], |
| | I3 = [−56, −55], I1 = [−15, −14], I2 = [23, 24], I1 = [35, 36], L1 = [−22~−21], L2 = [8~9, 37~39, 83~84], L3 = [65~67] |
| Struc589 | M = [−62, −53, 0, 4, 35, 37, 78, 81, 83, 97], W = [−63, −54, −46, −22, −15, −14, 67, 72, 91, 95, 96], D = [45, 59, 60], I2 = [−8, −7], L2 = [−68~−67], L3 = [12~14] |
| Struc590 | M = [−41, 15, 25], W = [−47, −46, −42, −40, −35, −34, −29, −7, 26, 45], D = [−38, −6], I1 = [−44, −43], I5 = [−29, −28], L9 = [38~39], L3 = [−20~−18], L4 = [−2~0, 8~11] |
| Struc591 | M = [−97, −55, 37, 47], W = [−86, −49, −41, −37, −32, −16, −15, 3, 11, 12, 39, 49], D = [55], L2 = [−90~−89, −84~−83, −77~−76, −31~−30, −5~−4, 7~8, 41~42], L3 = [−36~−34], |
| | L6 = [−64~−60], L7 = [50~51] |
| Struc592 | M = [−24, −22, −19, −14, −4, 0, 4, 6, 37, 52, 67, 72, 81], W = [−66, −62, 29, 30, 53, 74, 82, 91], I2 = [−48, −47], L1 = [54~56], L2 = [−50~−50, 20~22], |
| | L3 = [−61~−59, −7~−7, 83~85] |
| Struc593 | M = [−78, −61, −6, 16], W = [−86, −85, −16, −15, 8], D = [33], I1 = [−34, −33], I1 = [31, 32], L2 = [−90~−89, −43~−42], L3 = [43~45] |
| Struc594 | M = [−20, −17, −4, 12, 19, 31, 34, 41, 44, 78], W = [−53, −51, −49, −46, −44, −37, −32, −31, −23, −22, −10, −8, 7, 24, 33, 39, 42, 52, 57, 62, 67, 68, 95], D = [−12, 0], |
| | I2 = [−40, −39], I13 = [−37, −36], I1 = [2, 3], I1 = [47, 48], L2 = [−48~−47, 16~17], L3 = [−33~−33], L4 = [−43~−43, 57~59] |
| Struc595 | M = [−82, −76, −67, −56, −32, −24, −19, −4, 10, 27, 29, 32], W = [−74, −42, −33, 12, 17, 18, 34], D = [−60, −15], I4 = [−28, −27], L1 = [−13~−10], L2 = [−90~−89, −64~−62], |
| | L3 = [−69~−69] |
| Struc596 | M = [−96, −58, −28, −15, −12, −5, 0, 49], W = [−86, −81, −79, −74, −63, −47, −46, −40, 3, 6, 11, 12, 25, 29, 30, 31, 43, 45, 54, 55], D = [−64, −35, −34, −33, 58], |
| | I1 = [−87, −86], I1 = [−41, −40], L2 = [−91~−89, −78~−77], L3 = [−43~−43] |
| Struc597 | M = [−37, −34, −4, 4, 7, 35, 51, 53, 64], W = [−42, −41, −36, −18, 13, 36, 56], D = [42], I1 = [45, 46], L2 = [60~61], L3 = [−31~−29, 19~21, 68~70, 74~76] |
| Struc598 | M = [−41, −37, −33, −29, −5, 0, 8, 16, 34, 38], W = [−36, −28, −6, 31, 36], I1 = [−55, −54], L2 = [−47~−46, −26~−25, 12~13], L4 = [−18~−15] |
| Struc599 | M = [−76, −43, −31, −26, −22, −5, 12], W = [−87, −84, −80, −14, −73, −67, −45, 17, 18, 34], D = [−64], I15 = [−93, −92], I13 = [−92, −91], I14 = [−87, −86], |
| | I15 = [−80, −79], I3 = [−68, −67], L1 = [−59~−57], L2 = [−20~−19], L4 = [−11~−8, 27~30], L5 = [−82~−81], L13 = [−96~−96] |
| Struc600 | M = [−59, −26, −23, −4, 0, 20, 38, 65, 72], W = [−69, −61, −53, −43, −21, −20, 7, 44, 45, 52, 55, 68, 91], D = [−17, 60, 61], I1 = [−8, −7], |
| | L2 = [−64~−63, −14~−13, −11~−10, 50~51], L7 = [77~83] |
| Struc601 | M = [−70, −59, −54, −34, −30, −26, −23, −12, −9, 0, 6, 11, 13, 32, 92], W = [−40, −13, −10, −3, 27, 43, 46, 52, 68, 70, 74, 77, 88, 97], I13 = [51, 52], I1 = [54, 55], |
| | I8 = [57, 58], I15 = [61, 62], I6 = [74, 75], L8 = [80~85, 94~96], L2 = [−17~−16, 44~45, 66~67], L4 = [38~41, 88~89], L7 = [70~71] |
| Struc602 | M = [−92, −89, −80, −71, −46, −7, 0, 3, 25, 39, 49, 56, 83, 91, 99], W = [−60, −32, −15, −8, 44, 80], I2 = [−61, −60], I1 = [71, 72], I1 = [78, 79], L2 = [−40~−39], |
| | L3 = [−21~−19] |
| Struc603 | M = [−83, −79, −77, −54, −43, −40, −37, −22, −7, 10, 30, 47, 58, 63], W = [−82, −73, −69, −59, −27, −15, −9, −8, 3, 19, 42, 49, 59, 60, 61, 91], D = [72, 73, 74, 75, |
| | 76, 77], L1 = [−62~−61], L2 = [13~14, 24~25, 44~45], L9 = [87~90] |
| Struc604 | M = [−82, 45, 75, 84, 94], W = [−78, −77, −70, −69, −61, −59, −51, −48, −47, −35, −32, −31, −5, 2, 3, 10, 24, 25, 31, 33, 34, 35, 36, 44], D = [−75, −74], I11 = [31, 32], |
| | I2 = [34, 35], L1 = [−9~−8], L2 = [59~60], L3 = [−16~−14] |
| Struc605 | M = [−62, −55, −47, −43, −29, −27, 22, 24, 30, 57, 60, 63, 88, 92, 99], W = [−95, −82, −80, −70, −64, −40, −37, 2, 3, 52], D = [−98, −97, −88, −10], I1 = [−66, −65], |
| | L1 = [−79~−78], L2 = [−24~−24, −7~−7], L3 = [47~49, 72~74] |
| Struc606 | M = [−90, −79, −70, −44, −25, −19, −14, 0, 3, 35, 84], W = [−73, −46, −45, −39, −8, −7, 14, 37, 100], D = [−65], I5 = [−85, −84], I5 = [40, 41], I1 = [42, 43], |
| | L3 = [−32~−30, 77~79] |
| Struc607 | M = [−88, −38, −22, −11, 0, 17, 37, 47, 68], W = [−99, −68, −67, −60, −55, −51, −43, −12, −4, 5, 7, 35, 51, 64, 79, 82], L1 = [−8~−5], L2 = [−84~−75, −66~−65, 39~40, |
| | 83~84], L3 = [76~78], L12 = [−36~−36] |
| Struc608 | M = [−88, −72, −38, −35, −32, −19, −5, 0, 11, 17, 28, 32, 42, 54], W = [−98, −69, −55, −6, −4, 16, 25, 49, 57], D = [−64], I2 = [25, 26], L2 = [−29~−28, −8~−7, 34~35], |
| | L3 = [−48~−46], L5 = [−79~−75] |
| Struc609 | M = [−41, −8, −3, 0, 8, 15, 19, 31, 48, 54, 79, 97], W = [−37, −36, −32, −25, −13, 25, 30, 47, 52, 53, 65, 66, 88, 93, 94], I1 = [17, 18], I2 = [74, 75], I11 = [86, 87], |
| | L2 = [−29~−28, 34~35], L3 = [59~61] |
| Struc610 | M = [−98, −77, −74, −55, −28, −6, 16], W = [−91, −85, −63, −43, −15, −4, 7, 8, 40], L2 = [−65~−65, −47~−46, 45~46], L3 = [−89~−87, 21~23] |
| Struc611 | M = [−77, −74, −66, −61, −37, −35, −18, 24, 59, 91], W = [−71, −70, −44, −40, −39, 1, 8, 48], I15 = [28, 29], I12 = [29, 30], I2 = [42, 43], I1 = [52, 53], L2 = [−49~−48] |
| Struc612 | M = [−79, −70, −48, −44, −36, −26, −7, 17, 35, 48, 84, 88], W = [−73, −62, −46, −45, −8, 25, 86, 95], D = [−65, −58, 66], I4 = [98, 99], L8 = [40~42], |
| | L2 = [−31~−30, −13~−12, 14~15], L3 = [77~79], L5 = [−91~−89] |
| Struc613 | M = [−76, −72, −60, −57, −31, −22, −19, −9], W = [−74, −67, −63, −62, −48, −45, −42, −34, −27, −17, −10, 15, 17, 18, 34], L2 = [−16~−15], L4 = [27~30] |
| Struc614 | M = [−71, −63, −60, −52, −38, −32, −16, −1, 2, 12, 19, 26, 37, 77, 82], W = [−70, −69, −59, −21, 22, 33, 34, 35, 63, 64, 86], D = [−56], I1 = [−46, −45], I2 = [56, 57], |
| | L2 = [−9~−8, 66~67], L13 = [49~50] |
| Struc615 | M = [−42, −40, −33, 30, 0, 8, 29, 47, 56], W = [−86, −82, −61, −80, −58, −47, −22, −21, 7, 12, 52, 54], I1 = [−59, −58], I5 = [−20, −19], L2 = [−72~−71, −68~−68, 50~61] |
| Struc616 | M = [−25, 0, 7, 24, 65, 69, 71, 79, 91], W = [−15, −14, −6, 17, 33, 46, 60, 97], I1 = [55, 55], L1 = [−11~−10], L2 = [36~41, 61~62, 84~85], L3 = [−38~−38], L4 = [−34~−34], |
| | L5 = [−21~−41], L8 = [−45~−44] |
| Struc617 | M = [−61, −44, −40, −34, −8, −4, 6, 56, 59], W = [−72, −70, −69, −62, −30, −15, −6, 16, 27, 30, 60, 64, 70, 79], D = [97], I1 = [64, 65], L1 = [91~94], L2 = [65~67], |
| | L3 = [24~26], L5 = [44~48], L6 = [80~83], L13 = [72~74] |
| Struc618 | M = [−59, −18, −15, 24, 30], W = [−95, −57, −39, −16, 13, 27], D = [−71, −27, −26], I1 = [−74, −73], I1 = [−51, −50], L2 = [−43~−42] |
| Struc619 | M = [−12, −10, 0, 34, 38, 51, 56, 73, 81], W = [−16, −15, 28, 71, 78, 86], L3 = [44~45, 56~58] |
| Struc620 | M = [−88, −83, −81, −75, −66, −40, −26, −20, −8, 0, 25, 32, 80], W = [−78, −69, −51, −38, −15, −14, −7, 2, 6, 11, 12, 24, 34, 38, 55], D = [−5], I1 = [−11, −10], |
| | I1 = [50, 51], L1 = [44~48], L2 = [−72~−71, 87~89], L4 = [55~56] |
| Struc621 | M = [−80, −71, −67, −64, −57, −46, 12, 37, 91], W = [−99, −60, −44, −32, −15, −8, 3], I15 = [−82, −81], I2 = [−61, −60], I1 = [76, 77], |
| | L2 = [−98~−97, −94~−93, −76~−75, −21~−20, 24~25, 48~61], L3 = [−40~−38], L4 = [64~66] |
| Struc622 | M = [−41, −18, 1, 13, 20, 42, 54, 57, 61, 64, 71], W = [−64, −58, −57, −47, −34, −28, −24, −19, −11, 30, 33, 39, 62, 78], D = [−61, 89], I8 = [−71, −70], I1 = [−59, −58], |
| | I3 = [33, 34], L2 = [22~23] |
| Struc623 | M = [−46, −41, −5, 0, 4, 14], W = [−92, −90, −82, −55, −8, −7, −6, 12, 31, 44], D = [−97, −96, −95, −94, 55, 56, 57], I1 = [−39, −38], I2 = [52, 53], I1 = [59, 60], |
| | L1 = [−36~−35], L2 = [−86~−86, −30~−29, 7~8, 10~11], L4 = [−78~−78, 25~28], L6 = [−63~−60] |
| Struc624 | M = [−64, −52, −50, −1, 2, 34], W = [−84, −70, −60, −49, −44, −5, 1, 4, 36, 58], D = [−76, −75, −14, −73, −72, −71], L2 = [−17~−16, 15~16, 29~30], L3 = [10~12], |
| | L5 = [−31~−27] |
| Struc625 | M = [−71, −42, −33, −30, −16, 0, 8, 51], W = [−91, −82, −81, −80, −47, −38, −22, −8, 1, 16, 34, 52], I3 = [−60, −59], I5 = [−22, −21], L2 = [−68~−68, 60~61], L4 = [44~47] |
| Struc626 | M = [−98, −69, −65, −46, 0], W = [−93, −91, −90, −85, −34, −4, 7, 8, 12, 35, 40], L3 = [−89~−87, 21~23], L6 = [−19~−14] |
| Struc627 | M = [0, 31, 34, 45], W = [−16, −15, −11, 1, 5, 26, 32, 71, 73, 86], D = [28], L3 = [56~58, 64~66] |
| Struc628 | M = [−67, −57, −34, −12, −7, −3, 0, 12, 21, 24, 28, 88, 99], W = [−69, −62, −37, −31, 30, 44, 57, 58, 64], I6 = [44, 45], I2 = [50, 51], I1 = [85, 86], |
| | L2 = [−75~−74, −29~−28, −25~−24, −20~−19, 60~63, 65~66, 81~83], L5 = [36~39] |
| Struc629 | M = [−11, 0, 42, 84, 89, 92], W = [5, 14, 31, 49, 73, 66], L2 = [33~34], L3 = [56~58, 64~66], L4 = [44~46] |
| Struc630 | M = [−46, 0, 17, 24, 26, 67, 85], W = [−83, −48, −24, −22, −21, 33, 68, 80], D = [−65, −64, −31, −30, −29, −28, −27], I2 = [−40, −39], I1 = [71, 72], L2 = [−53~−52, 34~35], |
| | L3 = [−60~−60], L6 = [80~81] |
| Struc631 | M = [5, 12, 52, 54], W = [−34, −31, −26, −14, 3, 8, 17, 27, 34, 60], D = [83], I3 = [30, 31], I4 = [34, 35], I4 = [37, 38], I12 = [40, 41], I10 = [45, 46], |
| | L2 = [−1~0, 19~20, 58~59] |
| Struc632 | M = [−67, −59, −44, −26, −23, −16, −4, 0, 6, 12, 20, 25, 35, 65], W = [−72, −69, −66, −43, −21, −20, −12, −11, 9, 29, 30, 44, 52, 55], D = [59, 60, 61, 78], I1 = [51, 52], |
| | L2 = [−10~−9, 68~69, 81~84], L4 = [71~72] |
| Struc633 | M = [−65, −61, −27, −22, −20, −17, 3, 22, 28, 44, 50, 69, 71, 96], W = [−70, −69, −64, −42, −16, −3, 7, 11, 14, 32, 35, 36, 52, 62, 82, 83, 84], I1 = [−7, −6], I2 = [35, 36], |
| | L2 = [−54~−53, −25~−24, −2~0], L4 = [53~60] |
| Struc634 | M = [−84, −36, −30, −12, −4, 37, 55], W = [−71, −66 −54, −49, −41, −37, −16, −15, 11, 12, 16, 18, 39, 4, 49, 54], I9 = [−97, −96], I1 = [−89, −8], L8 = [−74~−74], |
| | L2 = [−86~−86, −70~−69, −61~−60, 41~42], L3 = [−91~−90], L4 = [−79~−78, −64~−64] |
| Struc635 | M = [−17, 5, 21, 26, 49, 56], W = [20, 35, 61, 66, 67], D = [−4], I1 = [1, 2], I11 = [12, 13], I13 = [14, 15], L2 = [58~59] |
| Struc636 | M = [−46, −39, −37, −32, −20, 2, 25, 37, 61, 65, 83, 87, 91], W = [−95, −94, −60, −55, −52, −44, −30, −15, −14, −8, 57, 73, 90], I1 = [−95, −94], I1 = [−73, −72], |
| | I1 = [−70, −69], I2 = [−61, −60], I7 = [20, 21], I1 = [76, 79], L2 = [48~49], L3 = [−67~−67], L7 = [−80~−76] |
| Struc637 | M = [−78, −54, −11, −8, −5, 34], W = [−81, −77, −73, −62, −61, −59, −13, 9, 39, 46, 52, 54, 55, 60, 51, 72, 73, 81, 90], L2 = [−70~−69, −15~−14], L3 = [−40~−38] |
| Struc638 | M = [−79, −65, −43, −40, −32, −7, 2, 30, 47, 50], W = [−59, −49, −37, −15, −14, −9, 11, 19, 33, 40, 59, 91], D = [−77, −76], L9 = [89~90], L2 = [53~54], L4 = [71~74, 80~84], |
| | L5 = [−94~−90] |
| Struc639 | M = [−39, −35, −25, −20, −15, 0, 6, 35, 52, 70, 72, 96], W = [−12, −11, −9, −7, −4, 9, 15, 30, 38, 42, 44, 60, 74, 85, 93], D = [56, 57, 58, 59] |
| Struc640 | M = [−90, −86, −60, −12, 0], W = [−97, −87, −37, −36, −29, −27, −17, 8, 14, 24, 33, 34], D = [−47], I15 = [−98, −97], I1 = [−73, −72], I2 = [−27, −26], I1 = [32, 33], |
| | I15 = [33, 34], L1 = [−95~−94], L2 = [−78~−77, −40~−39, 27~28], L3 = [−69~−66, −24~−24] |
| Struc641 | M = [−89, −80, −68, −61, −55, −15, −6, 2, 5, 24, 42, 47, 54], W = [−97, −84, −83, −82, −70, −45, −39, −16, −2, 14, 16, 44, 45, 52], D = [12], I1 = [−44, −43], I1 = [7, 8], |
| | I4 = [34, 35], I1 = [56, 57], L4 = [−37~−37], L7 = [−33~−30] |
| Struc642 | M = [−86, −80, −54, −36, −33, −19, −14, 2], W = [−93, −81, −70, −59, −57, −50, −35, −28, −25, −18, −15, −6, 8, 26, 32, 45], D = [52, 53, 54, 60, 61], I12 = [−52, −51], |
| | L2 = [21~22, 28~29], L3 = [35~37] |
| Struc643 | M = [−66, −60, −32, −26, −20, −1, 21, 26, 43, 62, 66, 68, 72, 79, 84], W = [−70, −69, −62, −35, −21, −19, 4, 12, 22, 33, 34, 63, 74, 86, 99, 100], D = [−58], I1 = [−46, −45], |
| | I1 = [31, 32], I2 = [56, 57], L2 = [−17~−16, 35~37], L4 = [−9~−8] |
| Struc644 | M = [−65, −59, −53, −45, −42, −17, −11, −3, 0, 20, 44, 56, 64, 83], W = [−70, −64, −52, −10, −9, 7, 32, 58, 73, 14, 81, 82, 85, 93], D = [35], I1 = [29, 30], |
| | L1 = [26~27, 47~50], L2 = [−30~−29, 15~16, 89~90] |
| Struc645 | M = [−59, −33, −7, −2, 2, 14, 38, 54, 67], W = [−62, −61, −52, −40, −39, −31, −4, 6, 11, 12, 24, 25, 31, 32, 35, 36, 4, 81, 97], D = [−82, −81, −80, −79, 91], I13 = [29, 30], |
| | I1 = [79, 80], I1 = [95, 96], L2 = [−75~−74, −71~−68, −20~−19, 86~87], L4 = [−16~−13] |
| Struc646 | M = [−85, −49, −12, 0, 17, 32, 41, 67], W = [−83, −63, −62, −24, −22, −8, −3, 9, 10, 34, 37, 59, 81, 82], L1 = [24~26], L2 = [−65~−64, −53~−52, 35~36], L5 = [−46~−43] |
| Struc647 | M = [−65, −8, 28, 44, 47, 50, 71, 61], W = [−68, −57, −42, −35, −32, −16, −11, −7, −3, 7, 11, 27, 32, 35, 37, 52, 62, 70], I2 = [−59, −58], I12 = [−55, −54], I1 = [−32, −31], |
| | I14 = [−23, −22], I2 = [−20, −19], L1 = [−14~−12], L2 = [−61~−61, −48~−46, −38~−38, −2~0, 54~60], L3 = [35~36], L5 = [−53~−53], L6 = [−41~−41], L8 = [−28~−26] |
| Struc648 | M = [−38, 0, 12, 24, 26, 33, 55, 67], W = [−42, −37, −35, −27, −26, −25, −8, 8, 21, 22, 35, 61, 66], L1 = [18~20], L2 = [49~50, 58~59, 74~75], L3 = [41~43], L4 = [80~83] |
| Struc649 | M = [−66, −45, −24, −19, −7, −4, 0, 6, 79, 84], W = [−62, −61, −59, 20, 26, 27, 74, 89], D = [52], I2 = [−48, −47], I1 = [61, 62] |
| Struc650 | M = [−87, −84, −66, −59, −50, −15, 0, 6, 32, 36, 44, 58, 63, 71], W = [−72, −68, −57, −49, −24, −23, −14, −8, 27, 28, 29, 39, 49, 70], I4 = [−37, −36], L1 = [−95~−92], |
| | L2 = [−76~−75, −5~−4] |
| Struc651 | M = [−56, −13, 0], W = [−79, −70, −67, −66, −59, −58, −49, −43, −29, −28, 52], I1 = [−92, −91], I1 = [−73, −72], I3 = [31, 32], I4 = [51, 52], I2 = [55, 56], |
| | L1 = [−77~−75, −42~−41], L2 = [−97~−96, −61~−60, 44~45, 62~65], L3 = [19~21], L4 = [−35~−36, 25~27], L6 = [−87~−80] |
| Struc652 | M = [−40, −22, −15, 0, 18, 21, 29, 46, 48, 56, 59, 65, 76], W = [−45, −42, −17, −13, −6, 9, 42, 49, 93, 96, 98], D = [−9], L12 = [−36~−33] |
| Struc653 | M = [−73, −63, −19, −5, 28], W = [−68, −50, −20, −13, −4, 6, 30], D = [−56, −27, −26], I1 = [−55, −54], I1 = [35, 36], L9 = [−84~−79], L2 = [−66~−65], |
| | L3 = [−92~−90, −34~−32, −23~−23, 16~18] |
| Struc654 | M = [−56, −48, −44, −25, −20, −18, −15, −8, 2, 50, 56, 88, 91, 97], W = [−72, −70, −69, −39, −38, −37, −14, −4, 16, 21, 37, 60, 61, 66, 68], L3 = [46~48, 79~80], L4 = [23~26] |
| Struc655 | M = [−63, −60, −42, −32, −1, 2, 6, 12, 19, 26, 37, 66, 79], W = [−69, −25, 22, 24, 33, 34, 35, 63, 64, 77, 78, 86, 99], D = [−56], I3 = [−70, −69], I1 = [−46, −45], |
| | I1 = [57, 58], L2 = [−9~−8] |
| Struc656 | M = [−31, −19, −15, 30], W = [−95, −91, −73, −39, −16, −11, −10, 27, 28, 34], D = [−71, −27, −26], I1 = [−92, −91], L2 = [−50~−50], L3 = [−75~−74], L4 = [−43~−40] |
| Struc657 | M = [−89, −86, −74, −49, −46, −36, −11, −4, 0, 42, 67, 79], W = [−83, −72, −22, −21, −16, −5, −3, 28, 70, 81], D = [−30, 21, 27, 39], I2 = [−40, −39], |
| | L2 = [−53~−52, −14~−13, 16~17 23~24, 84~85], L4 = [32~35] |
| Struc658 | M = [−10, −7, 0, 6, 8, 12, 26, 28, 30, 49, 56], W = [3, 13, 17, 18, 20, 35, 48, 66], I9 = [72, 73], L2 = [−27~−26, 58~59], L3 = [36~38] |
| Struc659 | M = [−3, 0, 41, 53], W = [−40, −39, 3, 39], D = [81, 97, 98], I11 = [−40, −39], I2 = [93, 94], L2 = [64~65], L3 = [31~33], L6 = [−37~−36, −29~−24] |
| Struc660 | M = [−71, −67, −21, −11, −5, 6, 21, 49, 53, 75, 80], W = [−6, −54, −51 −46, −40, −17, 1, 4, 5, 9, 59, 67], I4 = [−54, −53], I4 = [−46, −45], I1 = [−24, −23], |
| | I15 = [84, 85], I9 = [87, 88], L1 = [−16~−15, 40~41], L2 = [−49~−48, −31~−30, 30~32, 65~66], L3 = [17~19] |
| Struc661 | M = [−71, −65, −63, −17, −11, −3, 0, 20, 29, 44, 56, 64, 83, 99], W = [−64, −54, −26, −21, −20, −10, −9, 28, 30, 32, 35, 67, 77, 85, 93], L1 = [47~50], |
| | L2 = [−53~−52, −30~−29, 26~27, 37~39, 89~90] |
| Struc662 | M = [−50, −43, −30, −27, −6, 0, 21, 26, 45, 47, 51, 99], W = [−9, −4, 13, 29, 33, 40, 50, 56, 88], D = [70], I3 = [−41, −40], I1 = [−39, −38], I6 = [−35, −34], |
| | I3 = [−11, −10], |
| | I1 = [9, 10], L1 = [−59~−57], L2 = [57~61, 92~93, 96~97], L3 = [2~5], L4 = [−67~−63, −19~−16, 17~80], L10 = [−47~−47] |
| Struc663 | M = [−42, −30, −9, −2, 15, 23, 31, 39, 89, 97], W = [−5, 13, 45, 52, 54, 61, 62, 88], D = [5, 6, 7], I1 = [46, 47], L2 = [−46~−45, −40~−39, −25~−25, 35~36] |
| Struc664 | M = [−54, −49, −45, −15, −7, −4, 0, 44, 72, 84], W = [−66, −65, −62, 7, 20, 26, 38], D = [52], I2 = [−48, −47], L2 = [−61~−59, −19~−18, 5~6] |
| Struc665 | M = [−28, −20, −9, 24, 29], W = [−88, −83, −82, −74, −65, −48, −13, 1, 4, 10, 33, 40], I2 = [37, 38], I5 = [57, 58], I2 = [60, 61], I1 = [64, 65], I2 = [68, 69], |
| | L2 = [−77~−76, −31~−30, −2~−1, 11~12] |
| Struc666 | M = [−71, −48, −44], W = [−98, −90, −89, −88, −87, −66, −47, −39, −14, 1, 17, 20], D = [−58], I1 = [−60, −59], L3 = [2~4], L10 = [−94~−94], L2 = [−78~−77], L4 = [−38~−34] |
| Struc667 | M = [0, 12, 18, 24, 26, 41, 49], W = [−42, −41, −37, −30, −24, 4, 8, 35, 61, 66], D = [−28, −27, −26, −25], I1 = [−41, −40], L1 = [75~77], L2 = [−31~−31], L3 = [−38~−38], |
| | L5 = [55~59] |
| Struc668 | M = [−41, −23, −18, −16, −5, 12, 56, 62], W = [−48, −37, −36, −6, 1, 3, 16, 27, 51, 57], D = [25], I3 = [−1, 0], L2 = [−57~−54, −46~−46, 7~8, 43~44] |
| Struc669 | M = [−93, −71, −59, −54, −47, −30, −24, −15, −11, −4, 0, 9, 41, 45, 48, 60, 63, 73], W = [−99, −98, −97, −92, −87, −77, −73, −61, −53, −38, −34, −16, −2, 12, 27, 28, |
| | 37, 50, 70], I2 = [79, 80], I12 = [81, 82], L2 = [−76~−75], L3 = [19~21], L4 = [−85~−82, 32~35] |
| Struc670 | M = [−16, −4, 0, 16, 25, 41, 51, 69, 73, 80, 85, 95], W = [−42, −41, −39, −27, −14, −13, −11, 9, 27, 58, 70, 72, 76, 92, 98], L8 = [90~91], L2 = [−40~−40, 36~37], |
| | L10 = [−29~−28] |
| Struc671 | M = [−37, −15, −2, 25, 37, 40, 45, 47, 60], W = [−96, −76, −58, −44, −40, −27, −20, 13, 100], I1 = [−65, −64], L2 = [−62~−61, 65~66], L3 = [−12~−10, 88~90, 96~97], |
| | L7 = [−73~−69] |
| Struc672 | M = [−61, −49, 8, 42, 49, 54], W = [−94, −87, −85, −77, −64, −63, 7, 12, 13], D = [−75, −74], I1 = [57, 58], L8 = [−4~−4], L2 = [−30~−29, −17~−16, −10~−8, 3~4, 16~17], |
| | L12 = [−45~−44], L4 = [28~30] |
| Struc673 | M = [−90, −49, −46, 0, 7, 19, 32, 67, 69, 85], W = [−88, −83, −22, −21, −3, 9, 10, 80, 81], D = [−60, −59, 15, 16, 17], I1 = [−39, −38], L1 = [24~26], |
| | L2 = [−53~−52, 34~35], L3 = [−68~−68] |
| Struc674 | M = [−29, 8, 17, 19, 39, 48], W = [−37, −36, −35, −25, −24, −19, −13, 3, 9, 16, 25, 52, 66, 74, 93, 98, 99, 100], D = [−3, 31, 55, 57, 65], I1 = [1, 2], I1 = [13, 14], |
| | I3 = [52, 53], I2 = [90, 91], L2 = [−40~−39, 34~35], L11 = [78~82], L7 = [−17~−17] |
| Struc675 | M = [−37, −27, −4, −1, 12, 30, 60], W = [−42, −41, −18, 2, 36], D = [42, 51], I1 = [45, 46], I1 = [54, 55], L1 = [69~71], L2 = [3~4, 19~20, 64~65] |
| Struc676 | M = [−94, −88, −55, −40, −34, −30, −15, −6, 24, 47, 54], W = [−97, −82, −70, −67, −20, −16, −2, 14, 16, 17, 28, 52], D = [−1, 0, 12], I1 = [−46, −45], I6 = [−38, −37], |
| | I1 = [7, 8], L2 = [−61~−61], L3 = [40~42] |
| Struc677 | M = [−83, −81, −68, −66, −33, −30, −16, −13, 8, 11, 29], W = [−91, −82, −80, −47, −41, −25, −22, 5, 7, 16, 52, 54], D = [0, 1], I1 = [−72, −71], I1 = [−59, −58], |
| | I4 = [−52, −51], I5 = [−22, −21], L2 = [19~20, 60~61], L3 = [45~47] |
| Struc678 | M = [−89, −61, −43, −33, −4, 0, 3, 6, 16, 25], W = [−70, −68, −64, −62, −38, −8, 31, 37, 40, 46, 55, 56, 57], I3 = [−95, −94], I1 = [−85, −84], I2 = [−76, −75], |
| | L2 = [−20~−19, 11~12, 29~30, 47~48], L3 = [−15~−13] |
| Struc679 | M = [−28, 8, 17, 19, 31, 34, 38, 48, 59, 68, 94, 96], W = [−40, −25, −24, 3, 4, 7, 9, 16, 25, 30, 52, 58, 91, 93], D = [87], I1 = [78, 79], L2 = [11~12], L3 = [53~55], |
| | L4 = [−3~0] |
| Struc680 | M = [−37, −31, −4, −1, 4, 7, 38, 64], W = [−42, −40, −39, −16, −16, −5, 6, 13, 31, 33, 56, 75], D = [14, 15, 42], L2 = [60~61], L3 = [19~21, 72~74], L4 = [68~69], |
| | L7 = [45~51] |
| Struc681 | M = [−42, −36, −34, 58], W = [−41, −40, −39, 6, 20, 26, 28, 30, 32, 59], D = [12, 49, 50, 51, 52], I1 = [−16, −15], I6 = [−7, −6], I1 = [1, 2], I8 = [20, 21], I13 = [31, 32], |
| | I2 = [35, 36], L1 = [−13~−12], L2 = [−47~−46, −2~−1, 6~7, 24~25], L3 = [14~16, 41~43], L12 = [65~77] |
| Struc682 | M = [−55, −40, −23, −13, −6, 24, 42, 47], W = [−97, −91, −84, −83, −16, −2, 14, 16, 44, 52], D = [−1, 0], I1 = [−46, −45], I2 = [54, 55], L1 = [−71~−70], |
| | L2 = [−82~−81, −61~−61], L4 = [−37~−37, −33~−33, 7~12] |
| Struc683 | M = [−90, −86, −68, −63, −60, −27, 27], W = [−78, −37, −36, −23, −17, −2, 3, 8, 10, 14, 24], I1 = [−47, −45], L1 = [−1~0], L2 = [33~36], L3 = [−41~−39], L15 = [−96~−96] |
| Struc684 | M = [−4, 34, 41, 47, 59, 70, 76, 83, 87, 97], W = [8, 9, 29, 38, 39, 49, 78, 80, 92, 100], D = [54], I2 = [−1, 0], I3 = [3, 4], L1 = [17~18], L2 = [63~64] |
| Struc685 | M = [−14, 0, 7, 24, 42, 50, 63, 70], W = [−3, 19, 25, 29, 31, 32], D = [9], I2 = [73, 74], L1 = [38~40], L2 = [34~35, 91~92], L4 = [83~85] |
| Struc686 | M = [−96, −51, −28, −23, 7, 17, 26, 69], W = [−61, −60, −24, −17, −6, −4, 4, 10, 15, 40, 66, 67, 75], D = [12, 62], L1 = [86~92], L3 = [−66~−64], L4 = [32~35], L5 = [−7~−7] |
| Struc687 | M = [−93, −87, −70, −45, −16, −11, 0, 6, 13, 45, 84, 93, 99], W = [−97, −96, −95, −80, −79, −76, −72, −55, −32, −29, −22, −12, −7, −6, 3, 10, 19, 30, 31, 38, 39, 54, 64, 81, |
| | 83, 92], D = [70, 71, 72, 73, 74, 75, 76, 17, 78], I1 = [29, 30], L1 = [−27~−26, 26~27], L2 = [−58~−57, −51~−50, −33~−33, 55~56], L3 = [64~65, 86~88], L7 = [−40~−39] |
| Struc688 | M = [−98, −95, −93, −91, −61, −44, −41, −38, −10, −7, 0, 29], W = [−67, −64, −60, −58, −11, 3, 16, 25, 28, 32, 36], D = [11], I1 = [9, 10], L1 = [33~34], L2 = [−17~−16], |
| | L3 = [−86~−84, −52~−50], L6 = [−77~−69] |
| Struc689 | M = [−68, −60, −9, −2, 6, 15, 52, 57, 66, 87], W = [−65, −48, −40, 42, 54, 55, 78, 79], D = [−33, −32], I1 = [36, 37], L2 = [−44~−43, 3~4], L3 = [−19~−17] |
| Struc690 | M = [−91, −38, −27, −3, 70, 80, 92], W = [−84, −47, −44, −34, −18, −12, −2, 14, 19, 33, 57, 61, 68, 91], D = [−77, −76, −75, −74, −73, −72, −71, −70, −69, 36, 37], |
| | I2 = [−31, −30], I15 = [−21, −20], I15 = [−19, −18], I14 = [−12, −11], I11 = [−9, −8], L2 = [−46~−45, 48~49], L3 = [−87~−85], L14 = [−14~−14] |
| Struc691 | M = [−95, −91, −76, −70, −53, −35, −28, −7, 27, 33, 36, 44, 61], W = [−93, −85, −67, −64, −49, −34, −29, −8, −6, 3, 11, 45, 76], I2 = [71, 72], L1 = [63~65], L3 = [−61~−59] |
| Struc692 | M = [−70, −20, −17, 0, 15, 47, 65, 68, 93, 97], W = [−75, −57, −50, −49, −29, −25, −7, 7, 44, 45, 76, 77, 81], L8 = [−62~−62], L2 = [−42~−41, 5~6] |
| Struc693 | M = [−86, −82, −61, −47, −39, −26, −10, −7, 0, 11, 26, 29, 43, 66], W = [−63, −60, −58, −51, −50, −46, −25, 3, 4, 10, 23, 30, 53, 65, 71], I9 = [−70, −69], I15 = [−63, −62], |
| | I1 = [−55, −54], L1 = [−33~−32], L2 = [−90~−89, 73~74], L3 = [−76~−74], L4 = [−13~−13, 33~36], L5 = [81~82] |
| Struc694 | M = [−79, −41, −38, −22, −9, −7, 0, 3, 11, 14, 22, 69, 74, 97], W = [−93, −81, −26, −2, 6, 7, 30, 50, 51, 62, 67, 100], D = [−86], I1 = [−85, −84], L1 = [31~35], |
| | L2 = [−75~−74, 59~60], L3 = [−19~−17], L4 = [−32~−31] |
| Struc695 | M = [−73, −56, −29, −19, −7, 3, 11, 33, 40, 50, 52, 60, 65, 85, 91, 94], W = [−85, −48, −47, −27, −26, −14, −12, −4, −3, 44, 99], I2 = [−41, −40], |
| | I4 = [37, 38], L1 = [−97~−92], L2 = [27~29] |
| Struc696 | M = [−87, −79, −46, −38, −9, −2, 14, 63, 66, 79, 89], W = [−93, −77, −43, −30, 2, 3, 19, 52, 58], D = [−32, −31], I1 = [−91, −90], I2 = [37, 38], L3 = [−19~−17, 55~57] |
| Struc697 | M = [−57, −33, −20, −8, 0, 22, 64, 70, 81, 99], W = [−95, −91, −83, −82, −74, −69, −54, −46, −42, −41, −17, −15, 6, 16, 18, 26, 31, 32, 67, 68, 71], D = [−51, −50], |
| | I2 = [−92, −91], I4 = [−67, −56], I11 = [−17, −16], I9 = [−14, −13], I13 = [−11, −10], I1 = [32, 33], L1 = [9~10], L2 = [−81~−80, −26~−25, 34~36, 44~45, 56~57, 74~75], |
| | L3 = [−73~−73, 12~14], L4 = [92~95], L5 = [−77~−77], L8 = [−87~−87] |
| Struc698 | M = [0, 19, 22, 87, 98], W = [−13, 10, 28, 49, 55, 61, 97, 99], D = [−30, −26, 12, 78], I1 = [−29, −28], I15 = [93, 94], L2 = [14~15, 35~36], L4 = [70~73] |
| Struc699 | M = [−67, 5, 11, 33, 40, 50, 57, 61, 85, 94], W = [−85, −84, −48, −12, 38, 99], D = [−96, −95, −94, −93, −92, 27], L2 = [−57~−56, 91~92], L3 = [−9~−7] |
| Struc700 | M = [−73, −35, −18, −12, 2, 5, 19, 51, 66], W = [−83, −77, −57, −19, 23, 26, 39, 56, 63, 64, 68, 95], D = [−65, −64, −38, 12, 77, 76, 79, 80, 81, 82, 83, 84, 85], |
| | I12 = [25, 26], L2 = [−50~−49], L3 = [−80~−78] |
| Struc701 | M = [−66, −60, −46, −27, −8, 2, 11, 13, 22, 28, 38, 51, 57, 60, 63, 92], W = [−2, 5, 54, 64], I4 = [−54, −53], L2 = [47~48, 69~70, 80~81], L3 = [−41~−40, −20~−18] |
| Struc702 | M = [−85, −66, −29, −24, 0, 5, 22], W = [−9, 3, 32, 41, 44, 46], D = [−81, −78, −77, −76, −75, −74, 31], L2 = [9~10], L3 = [−95~−94, −56~−54, −35~−33] |
| Struc703 | M = [−77, −55, −19, −15, 28, 59, 64, 67], W = [−64, −53, −47, −31, −7, −6, 57], D = [17, 31, 32], I2 = [73, 74], L2 = [−49~−48, −29~−28, 10~11, 37~38, 89~90, 94~95] |
| Struc704 | M = [−82, −80, −31, −9, 0, 4, 11, 19, 29, 80], W = [−91, −90, −55, −52, −48, −44, −37, −18, −6, −4, 27, 28, 35, 42, 55, 65, 72], D = [39], I1 = [−61, −60], L11 = [−14~−14], |
| | L2 = [−74~−74, 66~68], L3 = [−43~−41, 56~58, 70~71], L4 = [86~91] |
| Struc705 | M = [−86, −64, −59, −48, −41, −31, −28, −14, −7, 0, 37, 78], W = [−81, −57, −52, −18, −8, 3, 4, 18, 22, 25, 27, 42, 50, 58, 68, 75], D = [−93, 62, 53, 64, 65, 66, 67], |
| | I1 = [−37, −36], I1 = [23, 24], I11 = [24, 25], I1 = [76, 77], L2 = [40~41, 71~72], L5 = [32~34] |
| Struc706 | M = [−91, −85, −54, −29, −14, 0, 2, 5, 9, 15, 22, 31], W = [−78, −77, −74, −73, −60, −53, −38, −32, 32, 33, 35, 41, 43, 44], I1 = [36, 37], L1 = [−36~−33], L2 = [−96~−94] |
| Struc707 | M = [−51, −49, 9, 41], W = [−53, −52, −39, −29, −28, −9, −7, 27, 33, 35, 65], D = [7, 59, 60, 61, 62, 63, 64], I1 = [5, 6], L2 = [53~54, 72~77], L6 = [27~32] |
| Struc708 | M = [−42, −27, −22, −16, −12, 5, 12, 59, 77, 96], W = [−53, −51, −50, −20, −19, −18, −17, −9, 20, 48, 57, 64, 68, 69, 74, 76, 80, 81, 88], D = [−45, −38], |
| | L2 = [−65~−64, −59~−58] |
| Struc709 | M = [−54, −31, −19, −15, 0, 6, 76], W = [−52, −43, −20, −18, −11, 10, 13, 49, 60, 80], D = [22, 23, 65, 66], I1 = [90, 91], L2 = [−49~−48, −42~−41, 11~12], L4 = [60~61], |
| | L6 = [95~97] |
| Struc710 | M = [−83, −74, −32, −29, −10, 0, 2, 20, 40], W = [−84, −73, −54, −22, −21, 11, 29], I2 = [−79, −78], L2 = [−15~−14, 9~10, 32~33] |
| Struc711 | M = [−86, −76, −66, −41, −35, −29, 0, 8, 22, 31, 40], W = [−90, −89, −78, −77, −74, −62, −53, −49, −13, −10, −9, −2, 3, 11, 36, 39, 41, 43, 44], I2 = [45, 46], |
| | L2 = [−73~−72, −15~−14, 4~5] |
| Struc712 | M = [−68, −63, −55, −16, 0, 55], W = [−73, −67, −54, −27, −17, −2, 26, 32, 38, 45, 59, 86, 92, 98], D = [99], I1 = [−59, −58], I2 = [−47, −46], I2 = [−11, −10], |
| | I7 = [61, 62], |
| | I1 = [64, 65], I6 = [87, 88], L2 = [−53~−52, −7~−6, 4~5, 22~25, 38~39, 46~47], L3 = [−33~−31, 69~70], L5 = [29~31], L14 = [71~80] |
| Struc713 | M = [−30, −26, −24, −11, 28, 35, 43, 60, 74], W = [−13, 10, 29, 55, 61, 78, 97], D = [69], L9 = [86~88], L2 = [14~15, 65~67], L3 = [−2~0, 37~39, 78~80] |
| Struc714 | M = [−83, −31, 0, 2, 20, 32, 48], W = [−74, −73, −66, −58, −54, −30, −22, −21, 41, 52], D = [−78], I3 = [−76, −75] |
| Struc715 | M = [−92, −52, −39, −18, 0, 5], W = [−93, −87, −84, −57, −40, −7, 13, 20], D = [24], L2 = [−67~−66, −46~−46, −42~−41, −21~−20] |
| Struc716 | M = [−77, −38, −23, 0, 27, 38, 58, 61, 66, 69, 73], W = [−87, −85, −81, −80, −69, −60, −39, −8, 5, 19, 23, 32, 35, 56, 80], |
| | D = [−96, −68, −67, −66, −65, −64, −63, −62, −57, −56, −55, −54, −53, −52, −51, −50, −13], I1 = [−87, −86], L2 = [10~11, 33~34], L5 = [82~86] |
| Struc717 | M = [−59, −54, −41, −36, −27, −13, 4, 22, 27, 31, 79], W = [−19, −11, 32, 50, 54], D = [−65, 65, 67], I2 = [−72, −71], I11 = [−20, −19], I3 = [52, 53], I1 = [57, 58], |
| | I1 = [59, 60], I1 = [73, 14], L1 = [76~77], L2 = [43~44], L3 = [−51~−51, −2~0], L5 = [−46~−46] |
| Struc718 | M = [−19, −2, 6, 15, 41, 46, 49, 52, 80, 99], W = [−49, −4, −43, −16, 5, 7, 60, 98], D = [−32, −31], I1 = [27, 28], L2 = [−46~−45, −39~−38, −27~−26], L3 = [33~34], |
| | L4 = [−12~−9] |
| Struc719 | M = [−98, −94, −61, −57, −41, −33, −28, 0, 40, 43, 59, 69], W = [−92, −62, −60, −14, −5, −4, 3, 4, 16, 21, 34, 58, 70, 82, 86, 87, 92], D = [−51, −50], I15 = [−85, −84], |
| | I14 = [−78, −77], I1 = [−47, −46], I1 = [−45, −44], I2 = [76, 77], L2 = [28−29, 35−36, 55−56], L3 = [9~11], L4 = [93~96], L5 = [−11~−7], L11 = [−83~−79], L14 = [−74~−74] |
| Struc720 | M = [−83, −78, −67, −51, −28, 0, 13, 18, 54, 73, 91, 97], W = [−99, −98, −87, −69, −50, −38, −7, −6, 17, 26, 27, 42, 47, 64, 89], D = [65, 66], I1 = [−35, −34], |
| | L1 = [−32~−31], L2 = [−56~−55, 6~7], L3 = [−86~−85, 29~31], L5 = [35~39], L8 = [−97~−91] |
| Struc721 | M = [−66, −63, −32, −15, 0, 2, 6, 29, 44, 76], W = [−86, −85, −77, −54, −23, −22, −20, −9, 9, 18, 41, 51, 73, 75], D = [37], I1 = [−96, −95], L2 = [−76 −75, 49~50], |
| | L3 = [60~67] |
| Struc722 | M = [−91, −70, −65, −61, −53, 0, 27, 29, 68], W = [−63, −56, −55, −54, −49, −48, −43, −40, −14, 3, 4, 6, 16, 25, 28, 35, 45, 58, 69, 76], D = [−39, −38, −37, −36, −35, −34], |
| | I2 = [−85, −84], I1 = [−12, −11], I2 = [64, 65], L2 = [−9~−7], L3 = [−98~−97, −77~−76, 9~11] |
| Struc723 | M = [−91, −63, −35, −30, −25, 33, 37, 44, 49], W = [−74, −73, −54, −53, −31, −27, −23, −17, −13, −9, 3, 9, 18, 47, 72], D = [52, 53, 54], L10 = [65~71], |
| | L2 = [−76~−75, −41~−40, −15~−14, 76~77], L3 = [4~6] |
| Struc724 | M = [−87, −63, −48, −38, −9, 9, 14, 48, 58, 62, 68, 97], W = [−90, −88, −84, −26, −2, 30, 50, 51, 52, 53, 63, 70], D = [36, 37, 38, 39], I2 = [−31, −30], |
| | L2 = [−74~−73, −42~−41, −20~−19] |
| Struc725 | M = [−98, −94, −34, −23, −21, 0, 11, 72], W = [−92, −78, −65, −64, −58, −7, −6, −5, 3, 4, 6, 16, 30, 32, 52, 65, 67, 99], I6 = [−78, −77], I2 = [−72, −71], I1 = [−37, −36], |
| | I3 = [98, 99], L1 = [84~87, 91~93], L2 = [−62~−59, −56~−56, −41~−39, −11~−10, 57~59], L3 = [−16~−14, 33~36], L4 = [26~29], L5 = [−85~−83] |
| Struc726 | M = [−6, −62, −37, 23, −11, 71, 7], W = [−99, −75, −68, −67, −32, −22, −10, 4, 9, 21, 43, 57, 76], L2 = [−80~−79, −73~−72, −52~−49, 58~60, 65~66], L4 = [30~33] |
| Struc727 | M = [5, 10, 15, 27, 35, 46, 66, 69], W = [−91, −89, −65, −64, −52, −6, −4, 3, 11, 33, 34, 79, 86, 99], D = [−71, −31], I1 = [−94, −93], L1 = [62~63], |
| | L2 = [−51~−50, −28~−28], L3 = [95~98] |
| Struc728 | M = [−57, −51, −19, −7, 51, 86, 92, 95], W = [−94, −81, −71, −66, −50, −27, −12, 5, 45, 47, 55, 58, 81], D = [−47, 26, 27, 33, 34, 35, 36, 37, 38, 39, 40, 41, 42, 43, 44], |
| | I2 = [−42, −41], L8 = [69~71], L2 = [−30~−29] |
| Struc729 | M = [−89, −87, −81, −53, −46, −38, −35, −27, 14, 47, 63, 70, 89], W = [−93, −92, −77, −49, −43, −39, −36, −5, 2, 5, 6, 15, 19, 58], L2 = [78~79] |
| Struc730 | M = [−55, −50, −18, −9, 0, 12, 22, 57, 80, 97], W = [−74, −72, −69, −57, −27, −26, −25, −19, −7, 26, 62, 76], I2 = [42, 43], I1 = [93, 94], L2 = [−13~−12, 29~30, 45~47, |
| | 77~78], L3 = [5~7, 15~17, 91~92], L12 = [−63~−62], L6 = [63~68] |
| Struc731 | M = [−96, −89, −85, −68, −41, −10, −6, 0, 11, 37, 45, 51, 56, 60], W = [−65, −64, −49, −48, −40, −34, −7, 3, 4, 9, 30, 35, 62, 64, 66, 68], |
| | D = [−72, −53, −52, 71, 72, 73, 75], |
| | I1 = [−47, −46], I1 = [−45, −44], I8 = [61, 62], L2 = [33~34], L3 = [−62~−60], L4 = [−29~−26] |
| Struc732 | M = [−61, −53, −9, −7, −2, 41, 43, 65, 83, 90], W = [−87, −49, −44, −43, −40, −39, −30, 3, 15, 45], D = [−94, −32, −31], I3 = [34, 35], L2 = [−89~−89, −38~−37, 6~7], |
| | L3 = [−19~−17, 55~57] |
| Struc733 | M = [−74, −69, −52, −20, −18, −1, 7, 45, 57, 67, 81, 83], W = [−66, −57, −56, −12, 14, 23, 41, 53, 60], D = [9], I1 = [−38, −37] |
| Struc734 | M = [−93, −65, −48, −38, −19, −16, −12, −9, −2, 49, 64, 71, 84, 88], W = [3, 63], L2 = [−33~−30, 5~7, 31~36, 60~61] |
| Struc735 | M = [−5, 5, 10, 15, 36, 46, 58, 63], W = [−91, −89, −65, −64, −62, −49, −48, −41, −6, 3, 11, 20, 27, 33, 34, 40, 67, 73, 79, 86], D = [−95, −94, −73, −72], I2 = [72, 73], |
| | L2 = [−29~−28, 80~81] |
| Struc736 | M = [−59, −56, −27, 0, 5, 7, 12, 59, 61, 77], W = [−82, −80, −74, −69, −53, −29, −18, −17, −9, 15, 20, 23, 26, 32, 57, 64, 65, 68, 69, 74, 92], D = [−45, 82], I3 = [93, 94], |
| | I13 = [94, 95], L2 = [−79~−78, −65~−64, −13~−12, 44~45, 66~67], L3 = [−24~−22], L5 = [27~31] |
| Struc737 | M = [−69, −40, −33, −28, −6, 0, 13, 33, 39, 46, 73, 91], W = [−71, −45, −38, −16, 2, 8, 23, 41, 45, 47, 79, 87, 88, 90], D = [−92, 9], L2 = [−78~−77] |
| Struc738 | M = [−88, −80, −78, −57, −17, 0, 3, 19, 42, 57, 70], W = [−92, −86, −53, −48, −35, −30, −26, −15, 25, 39, 71, 77, 92, 100], I1 = [77, 78], L2 = [−55~−54, 7~8, 35~36], |
| | L3 = [−34~−33], L6 = [83~88] |
| Struc739 | M = [−41, −20, −16, −10, 2, 12, 15, 29, 98], W = [−58, −57, −26, −24, −23, −18, −17, −11, 5, 23, 45, 57, 66, 67, 76, 77, 79], I1 = [90, 91], L2 = [−28~−27, −4~−3], |
| | L3 = [−51~−49, −36~−34] |
| Struc740 | M = [−96, −83, −65, −39, −33, −16, 0, 25], W = [−93, −82, −59, −50, −25, −19, −14, −12, −5, 9, 10], D = [−8], I3 = [−25, −24], I1 = [−23, −22], L6 = [−69~−69] |
| Struc741 | M = [−46, −41, 2, 44, 48, 51, 57, 60, 77, 80], W = [−58, −27, −19, −9, 5, 20, 54, 66, 72, 76], D = [−49, 93], I1 = [−38, −37], L2 = [−18~−17, −11~−10, 70~71, 98~99] |
| Struc742 | M = [−96, −85, −81, −52, −50, −29, −24, −19, −7, 9, 47, 60, 69, 75, 94, 99], W = [−92, −91, −84, −35, −27, −26, −12, −4, −3, 5, 36, 46, 48, 50, 57, 14], D = [27], |
| | I7 = [−92, −91], I15 = [−91, −90], I3 = [−88, −87], L2 = [34~35, 39~40, 91~92], L3 = [−42~−42] |
| Struc743 | M = [−69, −55, −52, −19, −9, −3, 0, 16, 23, 47, 52, 58, 66, 79, 87], W = [−82, −81, −71, −44, −39, −37, −22, −20, −6, 32, 33, 65, 88], D = [−50], I9 = [−34, −33], |
| | L2 = [−77~−76, −25~−24, 4~5, 42~43, 70~73, 82~83], L3 = [−95~−93, −15~−13, 34~36], L4 = [−66~−64, −61~−58] |
| Struc144 | M = [−50, −29, −18, −11, −6, 11, 33, 42, 65, 67, 73], W = [−82, −41, 5, 6, 13, 15, 75, 78, 79], D = [−45, 19, 20, 21, 22, 23, 24, 25, 26], I1 = [−89, −88], I1 = [39, 40], |
| | L2 = [−58~−57, [53~54], L3 = [−68~−65] |
| Struc745 | M = [−3, 1, 9, 44, 56, 59, 64, 73], W = [−21, −19, −18, 13, 19, 38, 45, 82], D = [36, 37], I1 = [94, 95], L2 = [28~29, 88~89], L3 = [−9~−7] |
| Struc746 | M = [−90, −85, −52, −50, −43, −29, −19, −7, 4, 47, 49, 91, 94], W = [−96, −56, −54, −48, −47, −41, −40, −14, −12, −6, 6, 46, 57, 70, 90], D = [27], L2 = [39~40] |
| Struc747 | M = [−51, −17, 25, 45, 68, 71, 76, 81, 94], W = [−53, −35, −30, −24, −18, −12, −5, 2, 13, 33], I1 = [−63, −62], I1 = [90, 91], L1 = [−47~−46], L2 = [−58~−57, 21~22, 53~54] |
| Struc748 | M = [−72, −41, −35, −10, −4, 0, 16, 73], W = [−93, −83, −50, −28, −21, −20, −18, 3, 4, 8, 18, 32, 49, 50, 72], D = [56, 57, 58, 59], I1 = [−69, −66], I5 = [−67, −66], |
| | I8 = [35, 36], L1 = [−63~−60, 77~79], L2 = [−86~−85, −78~−77, −16~−15, 16~11], L3 = [−57~−51, 27~29], L5 = [65~69] |
| Struc749 | M = [−64, −7, 10, 28, 50, 68, 83], W = [−65, −63, −8, 47, 48, 65, 66, 76, 78], D = [−51, −50, −49, −48, 57], I1 = [−57, −56], I1 = [−55, −54], I3 = [62, 63], |
| | L1 = [−94~−93, 53~55], L2 = [−29~−28, 3~4], L3 = [86~87], L4 = [33~36] |
| Struc750 | M = [−27, −22, −14, 0, 37, 58, 61, 63, 68, 98], W = [−23, −3, 2, 18, 52, 67, 70], D = [87], I9 = [−29, −28], I2 = [29, 30], I6 = [40, 41], I14 = [82, 83], L2 = [14~15] |
| Struc751 | M = [−62, −17, −14, −3, 25, 54, 59, 61, 67], W = [−76, −75, −47, −42, −26, −25, 29, 39, 69, 70], D = [−33, 37], I2 = [−27, −46], L1 = [11~13], L2 = [−74~−73, 0~1, 20~21] |
| Struc752 | M = [−89, −78, −57, −50, −44, −22, −8, −4, 4, 35, 37, 40, 45, 49, 51], W = [−94, −93, −88, −84, −83, −67, −39, −27, −10, 30, 56, 68, 69], I1 = [−34, −33], L2 = [32~33], |
| | L3 = [−32~−32] |
| Struc753 | M = [−92, −67, −44, −39, −37, 0, 2, 9, 91, 98], W = [−70, −42, −31, −29, 5, 23, 24, 35, 46, 87, 88], D = [−6, 80], I15 = [−47, −46], I1 = [−9, −8], I2 = [41, 42], |
| | I1 = [46, 47], L1 = [53~56], L2 = [−77~−76, −53~−62, −51~−50, −19~−18, −14~−14, 38~39, 59~60, 95~96], |
| | L3 = [−85~−84, 31~33], L4 = [−26~−26], L6 = [−21~−21], L7 = [−48~−48, −32~−32], L11 = [67~74] |
| Struc754 | M = [−92, −67, −57, −46, −21, −18, −14, 0, 5, 15, 21], W = [−87, −84, −65, −60, −50, −23, −17, −7, 7, 13, 20], L2 = [−98~−98, −35~−34], L3 = [−54~−52, −41~−39] |
| Struc755 | M = [−46, −38, −33, −26, −17, 3, 6, 26], W = [−49, −44, −32, −28, −5, −4, 60, 65, 99, 100], D = [34, 81], I4 = [59, 60], I1 = [77, 78], L1 = [14~15, 49~53], |
| | L2 = [−12~−11], L3 = [21~23] |
| Struc?56 | M = [−85, −30, −28, −21, −18, −10, −7, −4, 0, 11, 15, 33, 49, 65], W = [−69, −67, −62, −23, −14, 4, 12, 16, 17, 18, 32, 36, 43], D = [70], I1 = [−46, −45], |
| | L1 = [−78~−77, −54~−51], L2 = [−65~−64], L3 = [−95~−93, −44~−41, 73~75], L4 = [26~29] |
| Struc757 | M = [−85, −70, −46, −32, −27, −17, 14, 42, 63], W = [−93, −92, −88, −77, −63, −49, −43, −4, 2, 19], D = [−41], I1 = [28, 29], L1 = [36~37], L2 = [−62~−61, 54~55, 78~79], |
| | L3 = [−39~−38], L4 = [88~91] |
| Struc758 | M = [−95, −77, −61, −58, −51, −47, −27, −11, −5, 11, 98], W = [−97, −87, −54, −53, −45, −42, 5, 44, 68, 69, 85, 88, 99], D = [33], I1 = [40, 41], L2 = [37~38], L3 = [82~84], |
| | L5 = [45~49] |
| Struc759 | M = [−67, −58, −55, −51, −35, −33, −22, 0, 7, 19, 59, 62, 65, 73, 79, 88, 97], W = [−98, −92, −82, −62, −50, −38, −26, 26, 47, 78], D = [29], I15 = [−83, −82], |
| | I8 = [−82, 81], I4 = [26, 27], L1 = [53~54], L2 = [−87~−85, 35~39], L3 = [−94~−94], L5 = [−16~−12], L10 = [−78~−78] |
| Struc760 | M = [−28, 9, 22, 32, 56, 89], W = [−61, −60, −48, −39, −29, −9, −7, −6, 10, 27, 65], D = [71, 72], L1 = [83~85], L2 = [−65~−64, 3~4, 28~29, 53~54, 63~64] |
| Struc761 | M = [−92, −67, −52, −34, −21, 0, 5, 15], W = [−91, −87, −84, −65, −60, −56, −50, −23, −7, 7, 12, 20, 23, 24], I2 = [−14, −13], I1 = [13, 14], L1 = [−18~−16], |
| | L2 = [−58~−57, −47~−46, 21~22], L3 = [−41~−39] |
| Struc762 | M = [−76, −40, −35, −4, 44, 69], W = [−93, −83, −52, −49, −48, −24, −7, −6, 3, 4, 33, 49, 50, 68, 72, 73], I1 = [−69, −68], I5 = [−67, −66], I1 = [53, 54], |
| | L1 = [−63~−60, −57~−53], L2 = [10~11], L10 = [35~37] |
| Struc763 | M = [−38, 0, 10, 14, 29, 73], W = [−78, −41, −39, −24, −18, −17, −12, 6, 12, 13, 31, 44, 45, 57, 64, 76, 82], D = [33, 34, 65, 66], I4 = [−55, −54], I2 = [25, 26], |
| | I4 = [57, 58], I2 = [68, 69], L2 = [85~86], L3 = [−61~−61, 97~99], L4 = [−59~−59], L7 = [−74~−67] |
| Struc764 | M = [−51, −29, −23, −9, 12, 23, 73], W = [−47, −10, 7, 13, 33, 42, 52, 60, 61, 76, 99], D = [−20, 65], I1 = [−19, −18], I1 = [−5, −4], I3 = [35, 36], I1 = [67, 68], |
| | L2 = [−57~−56, 5~6, 40~41], L3 = [88~90], L5 = [−43~−40] |
| Struc765 | M = [−76, −72, −68, −64, −48, −45, −41, 2, 22, 30, 34, 81], W = [−77, −73, −69, −65, −57, −56, −29, −19, −18, −12, −3, 5, 6, 12, 77], |
| | D = [55, 56, 57, 58, 59, 60, 61, 62, 63, 64, 65, 66, 67, 68], I1 = [−39, −36], L2 = [44~45] |
| Struc766 | M = [−25, −20, −4, 0, 34, 44, 46, 64, 74, 78, 81, 86], W = [−29, −26, −15, −11, 16, 31, 57, 58, 67, 75, 90, 92, 95], L2 = [−18~−17, −13~−12, 5~6], L3 = [69~71, 92~93] |
| Struc767 | M = [−29, −27, −22, 0, 15, 36, 48, 51, 58, 69], W = [−25, −3, 2, 52, 67], I2 = [29, 30], I6 = [41, 42], L4 = [86~87] |
| Struc768 | M = [−92, −90, −59, −40, −5, −1, 10, 13, 23, 33, 41, 55, 61, 66], W = [−50, −49, −28, 5, 29, 58, 65, 79, 86, 90, 94], D = [−25], I3 = [88, 89], |
| | L2 = [−48~−47, 36~37, 73~75, 98~99] |
| Struc769 | M = [−84, −27, −9, −1, 3, 9, 12, 36, 41, 51, 53, 59, 61, 71, 76, 85], W = [−6, 4, 5, 7, 67, 14, 75, 83], D = [−59], I2 = [−64, −63], L1 = [−61~−60, −46~−44], L2 = [−13~−12], |
| | L3 = [−50~−50, 64~66] |
| Struc770 | M = [−95, −69, −64, −60, −43, −16, −13, −6, −1, 15, 19, 49, 12], W = [−94, −93, −87, −70, −63, −59, −52, −51, −5, 29, 67, 75], I1 = [−85, −84], I3 = [84, 85], |
| | L2 = [−50~−49, −27~−26, 12~13], L3 = [34~36] |
| Struc771 | M = [−68, −80, −46, −43, −38, −10, −6, −1, 16, 26, 28, 55], W = [−98, −90, −89, −86, −47, −40, −27, 11, 37, 46, 69, 72, 79, 81], D = [−52, −51, −50, −25, I1 = [7, 8], |
| | I1 = [80, 81], I1 = [83, 84], L1 = [−74~−70], L2 = [−60~−59, 3~4, 59~60, 70~71], L3 = [76~77], L5 = [33~35], L6 = [−65~−63] |
| Struc772 | M = [−93, −61, −41, −5, 41, 67, 70, 86, 90], W = [−94, −57, −52, −44, −29, −28, 9, 28, 29, 37], D = [−48, −45, 80], I2 = [−53, −52], I2 = [54, 55], |
| | L1 = [−77~−76, −24~−23, 58~61], L2 = [−14~−13], L3 = [34~36, 74~76] |
| Struc773 | M = [−87, −82, −72, −49, −45, −36, −12, −4, 63, 74, 81, 96], W = [−91, −77, −26, −3, 11, 58], D = [28, 43], I2 = [−39, −38], L2 = [35~36], L4 = [−16~−14], L7 = [−93~−92] |
| Struc774 | M = [−61, −31, −29, −19, −1, 4, 8, 35, 40, 43, 73, 81], W = [−78, −75, −52, −43, −14, 24, 37, 44, 79, 82, 83, 91, 97], D = [−10], I1 = [24, 25], I3 = [46, 47], |
| | L8 = [60~67], L2 = [−77~−76, −66~−65, −41~−37, −6~−5, 53~54, 57~58], L6 = [98~99] |
| Struc775 | M = [−85, −82, −74, −69, −20], W = [−90, −77, −63, −56, −23, −18, −11, 22, 23, 26, 27, 59, 69, 71, 74, 76], D = [−28, −27, −26, −25, 14, 15], L1 = [−17~−12], |
| | L2 = [−58~−58, −1~0, 31~32], L3 = [−95~−93], L4 = [61~64] |
| Struc776 | M = [−98, −75, −50, 1, 12, 71, 73], W = [−91, −90, −89, −63, −53, −39, −28, 4, 5, 7, 10, 17, 23, 38, 92], D = [−23, −22], I14 = [−90, −89], I7 = [−63, −62], |
| | I15 = [−52, −51], |
| | I4 = [−39, −38], I2 = [−28, −27], I1 = [56, 57], I2 = [87, 88], I14 = [90, 91], I3 = [93, 94], L1 = [−58~−57, 8~9], L2 = [−96~−95, −72~−70, −15~−14, 34~35, 79~80], |
| | L5 = [−81~−78, 26~30], L7 = [−46~−44] |
| Struc777 | M = [−53, −47, −42, −26, 17, 30, 37, 41, 45, 66, 73, 79], W = [−56, −49, −37, −14, −9, 4, 5, 74], D = [55, 55, 57, 58, 59, 60, 61], L1 = [−72~−69], |
| | L2 = [−94~−93, −63~−62, −16~−15, 85~86], L3 = [−87~−78, 10~12] |
| Struc778 | M = [−65, −40, −34, 4, 19, 44, 70, 75], W = [−90, −64, −59, −48, −31, −30, −28, −27, −24, −17, −5, 5, 13, 17, 23, 26, 29, 34, 35, 36, 37], D = [63], I1 = [−70, −69], |
| | L2 = [−51~−50, 11~12] |
| Struc779 | M = [−96, −92, −51, −39, −15, 13, 17, 41, 94], W = [−62, −60, −52, −38, −28, −27, −8, −6, −5, 2, 4, 11, 28, 37, 51, 59, 67, 69, 74, 95], I1 = [62, 63], L8 = [96~99], |
| | L1 = [−14~−73], L2 = [86~87], L3 = [34~36] |
| Struc780 | M = [−95, −60, −27, −24, −11, −9, 1, 4, 11, 42, 44, 49, 59], W = [−99, −41, −33, −17, −7, 27, 29, 39, 62], D = [73, 74], I2 = [−69, −68], I4 = [−47, −46], L1 = [−54~−51], |
| | L2 = [−76~−75, −15~−14, 64~67, 86~87], L3 = [−40~−38, 34~36], L5 = [−84~−83] |
| Struc781 | M = [−50, −43, −33, −23, −9, −4, 3, 14], W = [−82, −73, −70, −64, −63, −51, −48, −47, −40, −11, −6, 11, 22, 26, 28, 32, 66, 67, 69, 75], D = [−95, 63, 80], L2 = [−91~−91], |
| | L3 = [41~43] |
| Struc782 | M = [−84, −76, −38, −12, 10, 16, 26, 28, 30, 57, 72, 84, 90], W = [−96 −78, −63, −4, −43, −28, −27, −15, −9, 34, 73, 74], D = [−80], I2 = [−72, −71], I2 = [−44, −43], |
| | L1 = [−53~−51], L2 = [−60~−59, −6~−5, 64~67], L3 = [−94~−92, 35~37, 94~95] |
| Struc783 | M = [−93, −62, −59, −37, −28, −9, −6, −2, 1, 25, 30, 45], W = [−99, −92, −68, −64, −63, −60, −57, −47, −43, 5, 10, 16, 17, 28, 29, 34, 35, 55, 58, 59, 76, 78, 81], |
| | D = [−49, 71], L2 = [−15~−14, 11~12, 66~67], L3 = [−97~−95, 74~75], L7 = [−78~−75] |
| Struc784 | M = [−38, −27, −20, −5, 84, 89], W = [−90, −43, 4, 5, 17, 35, 36, 37, 41, 59, 63, 67, 71, 72], D = [−73, −58], I1 = [44, 45], L2 = [−65~−65, 10~11], L3 = [30~32], |
| | L4 = [63~64] |
| Struc785 | M = [−98, −92, −60, −21, −9, 30, 37, 44, 47, 82], W = [−93, −84, −59, −53, −36, 17, 19, 35, 41, 43, 59, 66, 67, 72, 77], D = [−52, −51, −50, −49], |
| | L2 = [−28~−27, 0~1, 33~34], L3 = [−78~−76, 74~76], L4 = [10~13], L6 = [−41~−40, 90~95], L10 = [−69~−68] |
| Struc786 | M = [−51, −26, −13, −5, 89], W = [−91, −88, −60, −49, −31, 4, 5, 11, 12, 43, 65], L2 = [−65~−64, −58~−57], L3 = [−87~−85, −43~−40, 35~37], L4 = [79~81] |
| Struc787 | M = [−88, −38, −30, −17, −13, 10, 39], W = [−99, −91, −83, −57, −53, −51, −21, 2, 36, 40, 58, 66, 67, 71, 91], I10 = [−96, −97], I1 = [−96, −95], |
| | L2 = [−92~−92, −85~−86, −49~−48], L3 = [−43~−41], L4 = [74~76], L5 = [−67~−63], L8 = [28~35], L10 = [−82~−81] |
| Struc788 | M = [−89, −85, −63, −47, −26, −23, −14, −3, −1, 27, 29, 32, 38, 55, 76], W = [−98, −97, −91, −72, −65, −62, −32, −31, −21, −20, −8, −7, 9, 59, 65, 69, 70], D = [−56, −55], |
| | L2 = [22~23, 63~64], L3 = [−68~−66, −41~−39], L4 = [−76~−73] |
| Struc789 | M = [−83, −35, −29, −26, −9, 1, 7, 28, 34, 51, 66, 91], W = [−91, −64, −63, −60, −54, −51, −28, −21, −5, 4, 5, 17, 36, 41, 50], D = [−59, −58, −57, 97], I1 = [−70, −69], |
| | I7 = [−52, −51], L1 = [−93~−92], L2 = [−41~−40, −15~−14, 11~12], L4 = [69~72] |
| Struc790 | M = [−96, −89, −83, −70, −64, −54, −50, −48, −6, 13, 70, 75], W = [−62, −45, −28, −27, 11, 12, 41, 64, 90], D = [28], I1 = [25, 26], I1 = [85, 86], L2 = [−15~−14], |
| | L3 = [34~36], L4 = [58~62] |
| Struc791 | M = [−93, −53, −50, −46, −42, −26, −6, 17, 45, 79, 90, 94, 98], W = [−96, −56, −40, −27, −14, −9, 4, 19, 26], D = [28, 29], L1 = [−72~−69, 53~50], L2 = [−16~−15, 73~74], |
| | L3 = [−87~−79, −64~−62, 10~12, 85~87], L7 = [32~37] |
| Struc792 | M = [−85, −64, −52, −24, −6, −3, 3, 28, 41], W = [−92, −51, −38, −20, −19, 4, 11, 12, 37, 51, 58, 67], D = [−70], L1 = [81~84], L2 = [−30~−29, 34~35, 53~55, 74~75] |
| Struc793 | M = [−57, −34, −28, −16, 3, 15, 86], W = [−51, −38, −30, 11, 28, 29, 43, 53, 57], D = [63], L2 = [−71~−70, 41~42, 58~59], L3 = [−67~−63, −50~−48, 74~76], |
| | L4 = [34~37, 57~70], L7 = [−96~−90] |
| Struc794 | M = [−90, −74, −53, −30, 5, 29, 42, 61], W = [−93, −75, −63, −62, −48, −27, −26, 58, 96], D = [2], I1 = [−11, −10], I11 = [85, 86], |
| | L2 = [−59~−58, −50~−49, −19~−18, −6~−5, 34~35, 38~39, 94~95], L4 = [70~71], L5 = [78~79] |
| Struc795 | M = [−38, −25, −12, 0, 12, 36, 53, 74, 77, 81], W = [−11, −10, 33, 35, 41, 89], D = [95, 96], L1 = [−34~−32, −29~−27], L2 = [−19~−18, 22~23] |
| Struc796 | M = [−15, 5, 13, 17, 24, 52, 65], W = [−60, −57, −52, −48, −12, −8, 2, 11, 28, 46, 59, 67, 69], D = [−39, 34, 35, 36, 37, 38, 39, 40, 41, 87, 68, 89, 90, 94], |
| | I1 = [−37, −36], L1 = [−83~−81], L2 = [−93~−92, 60~61] |
| Struc797 | M = [−76, −74, −63, −39, −34, −24, −13, −10, −8, −3, 1, 4, 7, 10, 21, 49, 62, 65], W = [−94, −93, −85, −83, −73, −25, −35, 11, 47], D = [−57], I2 = [−89, −88], |
| | I4 = [−85, −84], I2 = [42, 43], L1 = [34~36], L2 = [−95~−95, −53~−52] |
| Struc798 | M = [−64, −59, −26, −12, 19, 29, 85, 93], W = [−48, 57, 58, 65, 68], D = [77], I2 = [33, 34], I1 = [56, 57], I1 = [61, 62], L3 = [−51~−49], L4 = [71~74], L7 = [37~45] |
| Struc799 | M = [−50, −47, −41, −28, −13, −10, 31, 87, 92], W = [−56, −52, −51, −49, 4, 5, 11, 12, 36, 37, 65], I14 = [82, 83], L4 = [72~75] |
| Struc800 | M = [−68, −56, −38, −34, 11, 28, 34, 36, 42, 46, 50, 68], W = [−99, −83, −50, −48, −47, −6, 10, 17, 32, 43, 45, 57, 58, 66, 71, 90], D = [−46], I1 = [56, 57], |
| | L2 = [−43~−43, 73~74], L3 = [−22~−20], L4 = [−64~−61] |
| Struc801 | M = [−98, −96, −93, −51, −28, −16, −6, −3, 11, 17, 35, 42], W = [−68, −67, −63, −53, −44, −34, −26, 12, 55, 65, 67, 72, 73, 74], D = [−40, −39, −38, −37], I4 = [14, 15], |
| | I10 = [30, 31], I1 = [89, 90], L2 = [−70~−69, −59~−58, 56~59] |
| Struc802 | M = [−95, −22, 30, 44, 56, 63, 69, 71], W = [−92, −76, −66, −54, −49, −14, 9, 19, 35, 58, 59, 66, 67], D = [−57, −56, −55, 81, 82, 83, 84, 85, 86, 87, 88, 89, 90, 91], |
| | I1 = [−82, −81], I1 = [−51, −50], L9 = [−67~−67], L2 = [−17~−15, 0~1, 6~8, 36~37], L3 = [−75~−73, 11~13], L4 = [−45~−44, −28~−28] |
| Struc803 | M = [−87, −60, −40, 79], W = [−66, −43, −12, 4, 5, 6, 41, 73], D = [63, 87, 88, 89, 90, 91, 92, 93, 94], I1 = [−70, −69], I7 = [−32, −31], I1 = [69, 10], |
| | L2 = [58~59, 74~76], L4 = [−50~−47], L5 = [34~38] |
| Struc804 | M = [−82, −30, 1, 3, 21, 33, 49], W = [−73, −72, −65, −57, −53, −29, −21, −20, 42, 53], D = [−77], I3 = [−75, −74] |
| Struc805 | M = [−60, −52, −47, −43, −40, −6, −3, 6, 8, 16, 35, 56], W = [−94, −92, −69, −23, 4, 5, 36, 75, 80], I5 = [−69, −68], I7 = [84, 85], I1 = [98, 99], |
| | L2 = [−85~−85, 87~88, 93~94], L3 = [59~62, 72~74] |
| Struc806 | M = [−76, −37, −22, 1, 28, 39, 59, 62, 67, 70, 74], W = [−86, −84, −80, −79, −68, −59, −38, −7, 6, 20, 24, 33, 36, 57, 81], |
| | D = [−95, −67, −66, −65, −64, −63, −62, −61, −56, −55, −54, −53, −52, −51, −50, −49, −12], I1 = [−85, −85], L2 = [11~12, 34~35], L5 = [83~87] |
| Struc807 | M = [−92, −79, −70, −53, −12, 3, 9, 64, 66, 80], W = [−64, −58, −51, −38, −28, −27, −5, 4, 5, 6, 11, 12, 61, 76, 82, 89], D = [26, 27, 28, 29, 30, 31, 32, 33], |
| | I2 = [−87, −86], I2 = [−20, −19], L2 = [−61~−59, 38~39, 43~49, 76~17] |
| Struc808 | M = [−93, −77, −59, −52, −24, −6, −3, 53, 76, W = [−84, −38, −27, 11, 12, 58, 67, 97], D = [4], L2 = [34~35], L3 = [−30~−28] |
| Struc809 | M = [−85, −66, −63, −51, −41, −29, −13, −5, 4, 62, 67], W = [−65, −60, −50, −28, −22, 18, 29, 77], D = [−71, −23, 19, 20, 21, 22, 23, 24, 25, 26, 27, 28], I1 = [−80, −79], |
| | I6 = [46, 47], L2 = [−49~−48, 35~36], L4 = [−93~−90, 56~59] |
| Struc810 | M = [−89, −66, −57, −42, −33, 3, 12, 29, 69, 73], W = [−97, −96, −78, −60, −50, −34, −28, −27, −11, −6, −5, 1, 4, 51, 58, 59, 66, 70, 74, 75], |
| | D = [−76, −75, −74, −73, −72, −71], I1 = [65, 66], L2 = [34~35], L3 = [−49~−47], L4 = [40~43] |
| Struc811 | M = [7, 18, 20, 37, 42, 71, 88], W = [16, 17, 53], I6 = [34, 35], I1 = [49, 50], I6 = [51, 52], I14 = [54, 55], L2 = [−9~−8, 61~62], L3 = [30~31, 76~78, 97~98] |
| Struc812 | M = [−83, −78, −41, −34, 0, 22], W = [−89, −80, −27, −26, −23, −18, −17], D = [10], L2 = [−73~−72, −50~−49] |
| Struc813 | M = [−85, −34, −3, 36, 55, 58], W = [−54, −49, −48, −41, −40, −29, 1, 3, 33, 60, 61, 64, 65, 66], D = [−61, −60, −8], I1 = [−66, −65], I1 = [3, 4], L1 = [−77~−76], |
| | L2 = [28~29], L3 = [−53~−51, 9~11] |
| Struc814 | M = [−40, −33, −29, −4, 18, 48, 53, 68, 82], W = [−35, −24, −23, −19, −17, 9, 10, 20, 72, 76], D = [89], L4 = [59~62] |
| Struc815 | M = [−35, −15, 9, 20, 32, 48, 86, 93], W = [−62, −57, −56, −55, −53, −42, 11, 13, 27, 72, 73, 74, 77, 87, 96], D = [35, 36, 37, 38, 39, 40, 66], L2 = [−59~−58, −9~−9] |
| Struc816 | M = [−79, −45, −31, −28, −22, −9, 11, 16, 33, 36, 43], W = [−81, −72, −53, −52, −37, −30, −21, −20, 4, 10], D = [−11], I1 = [38, 39], I1 = [39, 40], L2 = [−40~−39] |
| Struc817 | M = [−45, −4, 28, 35, 59, 97], W = [−41, −21, 6, 9, 16, 17, 19, 29, 33, 54, 55, 63, 73, 76, 79, 87, 92, 93], I3 = [46, 47], I1 = [83, 84], L2 = [−7~−7, 31~32, 71~72, 88~90], |
| | L3 = [38~40], L5 = [−31~−27] |
| Struc818 | M = [−33, 26, 32, 42, 92], W = [−42, −40, −39, −36, −13, 4, 7, 10, 49, 94, 95, 97, 98, 99], D = [13, 14, 55, 56, 57, 58, 59, 60, 61, 62, 63, 64, 65], L2 = [81~83], |
| | L3 = [20~21] |
| Struc819 | M = [−7, 10, 20, 51], W = [−13, 27, 35, 56, 73, 75, 85, 89, 96], D = [32, 66], I2 = [−2, −1], L2 = [36~45, 76~77] |
| Struc820 | M = [−12, 8, 11, 39, 57, 67, 72, 98], W = [33, 45, 49, 52, 63, 64, 75, 85], D = [87], I12 = [43, 44], L2 = [−1~0, 80~81], L7 = [45~48] |
| Struc821 | M = [−76, −57, −42, −27, −15, −6, 2, 21, 40, 43, 46, 73], W = [−82, −60, −59, −52, −33, −25, −22, −17, −11, 4, 5, 17, 19, 36, 58, 59, 72, 75], |
| | D = [−32, 29, 30, 31, 67, 68, 69, 70, 71], I3 = [−81, −80], I1 = [−66, −65], I2 = [−52, −51], I2 = [58, 59], L1 = [−48~−46], L3 = [−92~−91, −85~−84, −72~−70, 10~12], |
| | L4 = [34~35] |
| Struc822 | M = [−50, −21, −1, 3, 29, 33, 43, 49, 54], W = [−81, −46, 2, 4, 6, 9, 22, 58], D = [−73], I12 = [−90, −89], I15 = [−30, −29], I12 = [−28, −27], L2 = [−66~−64, −58~−57] |
| Struc823 | M = [−82, −68, −65, 8, 28, 44, 71, 82, 92, 97], W = [−86, −85, −79, −78, −70, −44, −42, −40, −37, −19, −6, −2, 40, 42, 54, 87, 88, 93], D = [−36, −33], I4 = [33, 34], |
| | I15 = [34, 35], L1 = [−31~−24], L2 = [−21~−20, −13~−12, 21~22], L3 = [51~53] |
| Struc824 | M = [−23, −18, 48, 50, 73, 75, 87, 94], W = [3, 14, 49, 66, 67, 14, 77, 92, 93], I1 = [56, 57], L2 = [6~7, 34~35, 61~62], L4 = [81~84], L6 = [−7~−6] |
| Struc825 | M = [−90, −78, −73, −56, −53, −5, 7, 16, 52], W = [−79, −74, −62, −51, −50, −48, −36, −28, −19, −18, 5, 14], D = [25, 33, 34], I1 = [−88, −87], I1 = [−30, −29], |
| | I6 = [−28, −27], L1 = [44~48], L2 = [−69~−68] |
| Struc826 | M = [4, 67, 74, 79], W = [11, 12, 22, 42, 49, 52, 57, 62, 77, 83, 90], L2 = [14~15, 50~51], L4 = [39~40], L6 = [35~36] |
| Struc827 | M = [−60, −40, −19, 7, 52, 94], W = [−58, −56, −39, 4, 13, 50, 80, 85, 88], D = [29, 30, 31, 32, 33, 34, 35, 36, 37], L1 = [61~62], L2 = [−48~−47, 86~87] |
| Struc828 | M = [11, 27, 43, 58, 66], W = [1, 3, 4, 9, 34, 35, 42, 45, 67, 74, 75, 78, 79], D = [17, 83, 84, 85, 86, 87, 88, 89, 90, 91, 92, 93], L3 = [36~38] |
| Struc829 | M = [−89, −57, −50, 12, 29, 40, 43], W = [−97, −96, −78, −60, −52, −34, −29, −27, −11, −6, 1, 28, 36, 58, 75], D = [−74, −73, −72, −71], I6 = [−45, −44], |
| | I15 = [−35, −34], I14 = [−33, −32], I15 = [−32, −31], I15 = [−31, −30], I14 = [−30, −29], I15 = [−29, −28], |
| | I15 = [−28, −27], I14 = [−27, −26], I1 = [62, 63], I2 = [69, 70], L2 = [34~35, 73~74], L3 = [64~66], L6 = [−41~−39] |
| Struc830 | M = [−79, −72, −68, −65, −60, −36, −7, 29, 44, 51, 82], W = [−86, −42, −40, −19, −17, −6, 6, 12, 34, 38, 42, 43, 62, 75, 79, 87, 88, 93], I12 = [33, 34], I8 = [34, 35], |
| | L1 = [−33~−25], L2 = [−82~−81, −21~−20, 73~74, 91~92], L3 = [−13~−11] |
| Struc831 | M = [−55, −28, −19, −6, 15, 25, 31, 41, 44], W = [−64, −58, −42, −22, −15, −14, −11, 4, 5, 12, 30, 59, 64, 90, 93], D = [65, 67], I9 = [60, 61], I1 = [80, 81], I2 = [93, 94], |
| | L1 = [73~74, 86~88], L2 = [78~79, 96~97], L10 = [81~82] |
| Struc832 | M = [58, 89], W = [11, 71, 96], D = [4], I3 = [42, 43], I7 = [48, 49], I14 = [50, 51], L2 = [−9~−8, 33~34, 77~78], L3 = [7~9, 97~99], L4 = [62~65], L5 = [16~20], |
| | L6 = [38~39] |
| Struc833 | M = [27, 44, 49, 66, 68, 83, 93], W = [−23, −21, −20, −19, −16, −15, 19, 35, 51, 91, 97], I3 = [−16, −15], I2 = [−3, −2], L2 = [3~4, 32~33], L4 = [−11~−11] |
| Struc834 | M = [−84, −74, −67, −36, −31, −28, −21, −14, −9, 28, 63], W = [−89, −76, −65, −30, −20, 10, 34, 49, 50, 51], L2 = [11~12], L4 = [−94~−93] |
| Struc835 | M = [−81, −76, −57, −50, −48, −45, −24, 49], W = [−89, −61, −8, 2, 9, 41, 42, 47, 51, 58], I12 = [−33, −32], I14 = [−30, −29], I1 = [−27, −26], I1 = [46, 47], I2 = [54, 55], |
| | L2 = [−72~−72, −15~−14, 33~34], L3 = [3~5], L5 = [−95~−94] |
| Struc836 | M = [−19, −15, 9, 20, 32, 37, 48, 93, 98], W = [−53, −47, −46, −14, −10, −3, 6, 13, 27, 36, 77, 80, 87, 96], D = [66], I1 = [−9, −8], L4 = [51~55] |
| Struc837 | M = [5, 42, 44, 51, 64, 85, 91], W = [4, 11, 12, 14, 18, 79], L2 = [74~75], L3 = [67~69], L4 = [31~34] |
| Struc838 | M = [−63, −60, −57, −45, 15, 25, 69, 74], W = [−64, −25, −15, −14, −11, −10, 3, 4, 5, 12, 30, 64, 67, 70, 89], I10 = [43, 42], I15 = [58, 59], I14 = [59, 60], I2 = [67, 68], |
| | I2 = [81, 82], I1 = [84, 85], L2 = [−4~−3], L13 = [36~38], L7 = [62~63] |
| Struc839 | M = [−65, −59, −57, −20, −3, −1, 88, 90], W = [−63, −33, −11, −10, −5, 5, 12, 21, 43, 44, 14], L2 = [−17~−16], L3 = [83~85], L5 = [31~35] |
| Struc840 | M = [−14, 42, 81, 87, 95], W = [−40, −36, −35, −23, −13, 4, 47, 49, 57, 58, 66, 94, 98, 99], L2 = [−34~−33], L3 = [20~21, 32~34] |
| Struc841 | M = [−12, 4, 11, 57, 61, 64, 67, 72, 78, 81, 86, 92], W = [15, 37, 42, 49, 52, 53, 63, 75], D = [38, 39, 40], I13 = [49, 50], L8 = [45~47], L2 = [−1~0] |
| Struc842 | M = [23, 64, 68, 75, 85, 91], W = [−13, −10, 11, 35, 43, 51, 52, 83], D = [4, 5], L2 = [38~39], L3 = [31~33] |
| Struc843 | M = [−82, −21, 14, 34, 37, 46, 68], W = [−62, −61, −45, −42, −26, −15, −14, 1, 4, 5, 11, 26, 28, 29, 79], D = [−50], I3 = [−41, −40], I4 = [64, 65], |
| | L2 = [−69~−66, −58~−57, −28~−27], L3 = [51~53] |
| Struc844 | M = [21, 30, 35, 47, 76, 80, 83, 86], W = [12, 18, 19, 43, 44, 48, 60, 64, 65, 72, 73, 81, 90, 96, 97], L1 = [3~7], L2 = [91~92], L3 = [10~12], L4 = [65~66] |
| Struc845 | M = [−67, −61, −41, −22, −13, −8, 0, 10, 18, 21, 31, 36, 42, 47, 56, 77, 84], W = [−59, −58, −43, −36, −34, −28, −27, −6, −5, 4, 7, 13, 28, 30, 37, 46, 63, 76], |
| | D = [−92, −91, −90, −89, −82, −81, −80, −79, −78, −77, −76, −75, −74, −73, −72, −71, −70, −69, −46, −45], |
| | I1 = [−56, −55], I3 = [−35, −34], I5 = [−31, −30], L2 = [66~67], L3 = [−17~−15] |
| Struc846 | M = [−91, −10, 0, 10, 16, 22, 32, 86], W = [−84, −70, −57, −38, −36, 15, 53, 62, 83, 89, 90], D = [−49, −48, 45, 46], I2 = [−46, −45], L2 = [−34~−33, −29~−27, 56~57], |
| | L3 = [−96~−94, −83~−81] |
| Struc847 | M = [−92, −67, −51, −28, 27, 29, 72, 76], W = [−65, −64, −49, −41, −35, −34, −16, 1, 3, 16, 33, 65, 71, 73], D = [−71], I1 = [3, 4], L2 = [−85~−85, −61~−60, 36~37, 49~50], |
| | L3 = [9~11, 57~60], L5 = [−8~−3] |
| Struc848 | M = [−84, −77, −67, −53, −31, −28, −21, 18, 45, 54, 63, 66, 75], W = [−72, −20, −13, 4, 32], D = [−95, 33, 34], L2 = [11~12], L3 = [−9~−7] |
| Struc849 | M = [−90, −80, −62, −57, −21, 3, 16, 27, 33], W = [−67, −27, −16, 2, 9, 41, 42, 58], I14 = [−28, −27], I13 = [−27, −26], I1 = [37, 38], L2 = [−72~−72, 11~12, 48~49], |
| | L3 = [−50~−48] |
| Struc850 | M = [−48, −9, 65], W = [−89, −88, −85, −21, −20, −13, −5, 2, 11, 12, 28, 29, 44, 50], D = [−84, −83, −82, −81, −80, −79, −18, −17, −76, −75, −14, −73], I1 = [37, 38], |
| | L1 = [−41~−37], L2 = [−53~−52, −45~−45, 46~47], L3 = [33~35] |
| Struc851 | M = [−91, −88, −75, −53, −46, −31, −24, 12, 75], W = [−99, −98, −96, −73, −64, −52, −50, −49, −33, −28, −26, 5, 13, 40, 76, 77], D = [38, 39], I1 = [80, 81], |
| | L2 = [−83~−81, −41~−40, −4~−3, 28~29, 34~35, 67~70], L3 = [−70~−70], L4 = [58~61] |
| Struc852 | M = [−48, −41, −36, −11, −3, 15, 18, 25, 38, 51, 79], W = [−59, −43, −15, −14, −9, −7, 3, 4, 5, 12, 13, 30, 33, 64, 94, 100], D = [−65, −64], I7 = [−59, −58], |
| | I14 = [−50, −49], I14 = [57, 58], I2 = [77, 78], I8 = [93, 94], I2 = [97, 98], L1 = [65~66], |
| | L2 = [−52~−52, −20~−19, −6~−5, 60~61, 73~74], L3 = [68~70, 81~82], L4 = [43~46], L10 = [85~89] |
| Struc853 | M = [8, 27, 62, 72, 77, 80, 84, 87], W = [6, 15, 49, 50, 56, 61, 82, 90, 95], D = [67], I1 = [65, 66], I3 = [99, 100], L2 = [19~20, 92~93], L4 = [34~37, 41~44] |
| Struc854 | M = [−46, −10, −2, 0, 25, 57], W = [−84, −50, −38, −36, 22, 50, 62, 89], D = [−22, −21, −20, −19], L1 = [43~45], L2 = [−83~−82, 16~17, 85~86] |
| Struc855 | M = [−81, −70, −49, −42, −40, −30, −17, 0, 3, 19, 68, 75, 87], W = [−88, −58, −25, −16, −12, 16, 27, 41, 67, 72, 97], I1 = [−99, −98], L1 = [34−36], |
| | L2 = [−78~−77, −74~−73, −67~−66, −24~−23, 12~13, 64~65, 80~81] |
| Struc856 | M = [−73, −58, −51, −20, 6, 12, 17, 30, 41, 68, 75], W = [−96, −90, −68, −64, −60, −59, −40, −27, −23, −15, −14, −9, 1, 5, 11, 28, 34, 44, 76, 77, 81, 99], D = [45, 46, 47], |
| | I12 = [−69, −68], I8 = [−68, −67], L2 = [−29~−28, −11~−10, 37~38], L6 = [86~94] |
| Struc857 | M = [−71, −13, −4, −2, 0, 22, 44, 94], W = [−72, −68, −29, 2, 5, 30, 35, 38, 51, 69, 70], |
| | D = [−93, −92, −91, −90, −89, −85, −87, −86, −85, −84, −83, −82, −67, −65, −59, −58, −31, −30, 39, 76], I3 = [−51, −50], I1 = [−45, −44], I1 = [41, 42], |
| | I5 = [50, 51], L1 = [−39~−66], L2 = [33~34, 71~72, 88~89], L3 = [−77~−76], L7 = [79~84] |
| Struc858 | M = [−92, −52, −34, −32, −29, −3, 27, 29, 51, 71], W = [−65, −64, −41, −26, −23, −16, 1, 3, 33, 34, 41, 57, 60, 61, 65, 73, 74], D = [−71, −8, 56], I1 = [3, 4], |
| | L2 = [−85~−85, −61~−60, 35~36], L3 = [9~11] |
| Struc859 | M = [−62, −57, −50, −48, −20, 19, 23, 35, 42, 49], W = [−89, −47, −27, −13, 2, 9, 10, 41, 58], D = [−68, −67], I14 = [−28, −27], I13 = [−27, −26], L9 = [32~33], |
| | L2 = [3~4], L3 = [−75~−73] |
| Struc860 | M = [−62, −57, −44, −36, −32, 61, 84, 86, 95], W = [−72, −33, −28, −25, −5, 2, 18, 28, 38, 58, 72, 91], I7 = [27, 28], I15 = [29, 30], I11 = [40, 41], L9 = [34~35], |
| | L2 = [31~32], L4 = [47~50] |
| Struc861 | M = [−94, −74, −58, −31, −20, −10, −5, 6, 12, 17, 30, 41, 68], W = [−62, −60, −48, −15, −14, −9, 1, 11, 35, 43, 61, 69, 91, 99], D = [45, 46, 47, 75, 76, 77, 78, 79, 80], |
| | I4 = [−69, −68], I15 = [−68, −67], L2 = [−81~−80], L3 = [−51~−49, 86~89] |
| Struc862 | M = [30, 55, 85], W = [−15, −14, −11, −10, 25, 34, 72, 88, 95, 99], L1 = [42~43], L2 = [12~13, 35~36] |
| Struc863 | M = [−25, 8, 12, 17, 22, 32, 41, 44, 61, 83], W = [−27, −22, −21, −18, 19, 20, 35, 50, 77, 97], I1 = [−19, −18], I10 = [−16, −15], L2 = [−8~−7, 3~4, 90~91], L3 = [72~74] |
| Struc864 | M = [−77, −64, −52, −50, −48, −41, −33, −13, −9, −6, 41, 50, 68, 75, 79], W = [−95, −82, −60, −59, −47, −17, 1, 11, 53, 58, 61, 94], D = [8], I2 = [−71, −70], I1 = [4, 5], |
| | L2 = [−28~−27, 34~35, 91~92], L3 = [27~29], L5 = [85~87] |
| Struc865 | M = [−59, −55, −37, −29, −25, −3, 2, 16, 43, 51, 74], W = [−23, 1, 3, 12, 72, 79, 84, 86, 92], I3 = [86, 87], I7 = [96, 97], L1 = [−15~−14], L2 = [−50~−49, −20~−19], |
| | L3 = [−11~−10, 75~77], L4 = [92~94], L5 = [34~38, 80~82], L10 = [58~70] |
| Struc866 | M = [−62, −28, −12, −1, 7, 12, 17, 21, 27, 63, 66, 95], W = [−66, −57, −40, −34, −33, −25, 2, 11, 16, 18, 60, 75, 76], D = [38], L1 = [−72~−71, 45~47], |
| | L2 = [−75~−74, 3~4], L3 = [71~73], L5 = [80~84] |
| Struc867 | M = [−14, −2, 0, 58, 83, 88], W = [−31, 5, 6, 10, 11, 18, 44, 47, 52, 71, 78, 81, 100], D = [−28, −27, −26, −25], I1 = [10, 11], I15 = [34, 35], I10 = [35, 36], |
| | I13 = [36, 37], I10 = [38, 39], I1 = [49, 50], I15 = [50, 51], I14 = [51, 52], I15 = [54, 55], I15 = |
| | [60, 51], I6 = [65, 66], L2 = [−33~−32, 67~68], L3 = [−20~−19], L14 = [55~56], L15 = [52~53] |
| Struc868 | M = [−60, −29, −9, 20], W = [−72, −68, −67, −57, −35, 7, 13, 37, 47], D = [−17, 0], I1 = [−78, −77], I13 = [−32, −31], I1 = [−19, −18], I1 = [−2, −1], I1 = [56, 57], |
| | L2 = [15~16, 34~35, 40~41], L5 = [−11~−11] |
| Struc869 | M = [−20, 25, 33, 35, 41, 82, 85, 90], W = [−62, −55, −54, −51, −29, −26, −14, −1, 5, 7, 21, 43, 44, 49, 52, 74, 75, 92], D = [−53, −48], I1 = [−61, −60], I9 = [−40, −39], |
| | I11 = [−29, −28], I1 = [64, 65], L2 = [−65~−65, −44~−43, −5~−4], L3 = [−17~−15], |
| | L4 = [37~−37, −33~−32] |
| Struc870 | M = [−12, 6, 43, 49, 52, 76], W = [−23, −22, −17, −16, −6, 3, 4, 40, 41, 69, 83], D = [9], I1 = [12, 13], I1 = [29, 30], I1 = [58, 59], L2 = [72~73], L3 = [−7~−7, 34~36], |
| | L4 = [62~66] |
| Struc871 | M = [−92, −85, −71, −66, −60, −57, −23, −4, −2, 13, 28, 72], W = [−80, −72, −68, −58, −49, −46, −45, −34, −22, −19, −10, 2, 3, 4, 6, 9, 19, 46, 51], D = [42, 43, 50, 76, 89], |
| | I5 = [45, 46], I3 = [86, 87], L2 = [−83~−82, −32~−31, 32~36, 92~93], L3 = [−41~−39, 81~83], L7 = [22~23] |
| Struc872 | M = [−83, −78, −34, −14, 0, 17], W = [−99, −89, −85, −80, −77, −26, −22, 10, 11, 21, 27], D = [−71, −70], I2 = [−74, −73], I5 = [22, 23], L2 = [−98~−95], L4 = [−52~−49] |
| Struc873 | M = [−94, −89, −78, −72, −63, −28, 0, 22], W = [−37, −27, −23, −22, −18, 21], I3 = [−40, −39], I1 = [−39, −38], L2 = [−50~−49], L3 = [−83~−81, −34~−34] |
| Struc874 | M = [0, 64, 87], W = [4, 15, 19, 47, 66, 70, 86, 92], D = [59, 60], L2 = [2~3, 51~52, 74~75] |
| Struc875 | M = [51, 60, 64], W = [−15, −13, −11, −9, 9, 31, 93], D = [15], I4 = [5, 6], L2 = [33~34, 67~68, 84~85], L3 = [73~75], L4 = [1~3], L15 = [0~0] |
| Struc876 | M = [−10, −5, 3, 9, 17, 52, 66, 73, 79, 92], W = [34, 35, 78, 84], D = [83], I1 = [74, 75], L2 = [19~20, 25~26, 37~38], L3 = [42~44] |
| Struc877 | M = [−37, −28, −23, 4, 11, 45, 50, 71, 81, 93], W = [−29, −16, −17, 6, 16, 26, 30, 46, 47, 74], D = [29], I2 = [−19, −18], L3 = [36~38, 54~56] |
| Struc878 | M = [−98, −96, −75, −57, −53, −20, −16, 0, 8, 13, 41, 81, 84], W = [−92, −63, −62, −60, −59, −51, −21, −19, 27, 35, 37, 44, 45, 57, 62, 75, 99], D = [−10, −9], I15 = |
| | [−44, −43], |
| | I14 = [−37, −36], I1 = [−6, −5], I1 = [−4, −3], L2 = [−69~−68, 69~70, 76~77, 96~97], L3 = [50~52], L5 = [−85~−81, 30~34], L11 = [−47~−38], L14 = [−33~−33] |
| Struc879 | M = [−45, −14, 0, 12, 27, 50, 83, 94], W = [−35, −34, −27, −26, 9, 21, 28, 29, 45, 51, 66, 77, 86, 97, 98], D = [−21], L2 = [6~7, 35~36, 46~47, 67~68, 89~90], L3 = [39~41] |
| Struc880 | M = [0, 7, 13, 25, 39, 43, 59, 64, 77, 88, 98], W = [−12, 4, 18, 26, 27, 34, 35, 37, 92], L3 = [−9~−9] |
| Struc881 | M = [−24, 3, 7, 30, 41, 58, 65, 88, 96], W = [−8, −7, 26, 37, 52], I1 = [83, 84], L3 = [74~77] |
| Struc882 | M = [−92, −66, −63, −58, −45, 13, 24], W = [−85, −84, −75, −37, −24, −19, −18, −16, −12, −11, 9], I5 = [−84, −83], I7 = [−37, −36], I1 = [−30, −29], L3 = [−10~−8] |
| Struc883 | M = [−43, −29, −14, 0, 7, 10, 16, 38, 41, 44, 14, 90, 99], W = [−21, −13, 57, 59, 78], D = [−38, −37, 33, 34, 35, 52, 53, 56], I1 = [−32, −31], L2 = [29~30, 63~64], |
| | L3 = [60~61], L6 = [94~97] |
| Struc884 | M = [8, 21, 25, 41, 58, 65, 70, 80, 96], W = [−19, 37, 42, 66], L2 = [74~75] |
| Struc885 | M = [20, 26, 58, 70], W = [−23, −17, −4, 6, 11, 27, 50, 65, 82], D = [30], I2 = [35, 36], L2 = [47~48] |
| Struc886 | M = [−85, −75, −68, −60, −19, 0, 37, 40, 43, 56, 69, 75], W = [−96, −83, −69, −63, −52, −24, −23, −12, −7, 3, 9], D = [−21], L2 = [−32~−32, 34~35] |
| Struc887 | M = [−75, −58, −32, −25, 0, 41, 85], W = [−98, −97, −90, −86, −81, −71, −46, −23, −3, −2, 6, 11, 17, 24, 26, 37, 44, 45, 56, 71, 73, 84, 91, 94, 95, 97, 99], |
| | D = [−9], I13 = [−98, −97], I10 = [−89, −88], I15 = [−84, −83], I5 = [−82, −81], I10 = [−78, −77], I2 = [−39, −38], |
| | I1 = [−8, −7], I1 = [67, 68], I4 = [70, 71], L2 = [−73~−72, −36~−35, 30~34, 75~77], L3 = [−95~−94, −64~−62, −21~−19, 64~66, 79~80], L4 = [−44~−44, 50~53], |
| | L6 = [87~88] |
| Struc888 | M = [−5, 0, 3, 29, 45, 49, 82], W = [−2, 4, 11, 36, 41, 42, 51, 77, 86, 94, 96], D = [53, 54], I1 = [97, 98], L2 = [59~60], L3 = [66~68, 74~76], L5 = [88~92] |
| Struc889 | M = [−26, 0, 11, 20, 27, 39, 78], W = [−50, −48, −29, −18, −9, 4, 5, 7, 12, 13, 29, 30, 72, 80, 96], D = [86, 87, 88, 89, 90, 91, 92, 93, 94], I12 = [−49, −48], |
| | I1 = [72, 73], L1 = [−21~−20], L2 = [35~36, 54~55], L4 = [−45~−45] |
| Struc890 | M = [−5, 21, 27, 30, 43, 60, 72], W = [−20, −19, 3, 25, 26, 26, 50, 51, 63, 68, 82, 84], L3 = [35~36] |
| Struc891 | M = [−32, −10, 0, 11, 20, 24, 29, 32], W = [−51, −34, −29, −26, 5, 13, 30, 40, 49, 52, 56, 69, 81], D = [−21, 93, 94], I2 = [−42, −41], I2 = [85, 87], L2 = [67~68], |
| | L7 = [43~48] |
| Struc892 | M = [−11, 21, 26, 29, 32, 42, 67], W = [−9, −5, 4, 48, 73, 76], I2 = [76, 77], L2 = [50~54, 61~62], L7 = [34~35] |
| Struc893 | M = [−71, −68, −57, −23, −8, 45, 52, 54, 69, 83, 98], W = [−16, −2, 12, 13, 14, 24, 50, 77, 81, 99], D = [−41], L1 = [−32~−29], L2 = [25~26, 75~76], L3 = [−13~−11] |
| Struc894 | M = [−3, 0, 14, 34, 48, 70, 80, 88], W = [−4, 12, 25, 59, 66, 67, 76], I1 = [−19, −18], I1 = [−16, −15], I9 = [−13, −12], I12 = [−7, −6], L2 = [38~39, 61~62, 98~99] |
| Struc895 | M = [−8, 11, 26, 59, 68, 79, 82], W = [−3, 21, 29, 30, 44, 55, 73, 74, 89], D = [20], L2 = [−18~−17, 34~35], L3 = [36~38] |
| Struc896 | M = [−34, −10, 0, 15, 27, 32, 39, 45, 50, 53], W = [−46, −44, −42, −35, −29, −27, −26, −25, 13, 28, 77, 92, 97, 98, 100], D = [−21], L1 = [−57~−51], L2 = [6~7, 67~68], |
| | L3 = [34~36], L4 = [88~91] |
| Struc897 | M = [−80, −5, 0, 8, 27, 31, 39, 44, 71], W = [−94, −83, −70, −69, −64, −63, −54, −38, −37, −34, −22, 6, 12, 38, 45], D = [35, 63, 64, 65], I1 = [29, 30], |
| | L2 = [−57~−56, −52~−51, 14~15], L4 = [−13~−9] |
| Struc898 | M = [18, 15, 29, 83], W = [−20, 4, 14, 23, 30, 60, 78], D = [65], I2 = [38, 39], I1 = [67, 68], L1 = [33~35], L3 = [−8~−6, 42~44], L4 = [73~76] |
| Struc899 | M = [−19, −10, −3, 0, 70, 80, 92, 99], W = [−22, −18, −15, −4, 14, 15, 20, 30, 34, 36, 54, 76, 77, 98], I15 = [−15, −14], L2 = [12~13], L3 = [84~86] |
| Struc900 | M = [−76, −44, −19, 0, 19, 33, 36, 52, 65, 70, 83, 86], W = [−84, −78, −12, 4, 28, 39], D = [−8, −5, 29], I2 = [−12, −11], L1 = [−36~−35] |
| Struc901 | M = [−20, 0, 12, 36, 54, 65, 70, 99], W = [−72, −51, −47, −15, −12, −11, 4, 11, 45, 84], D = [−61, 29], I10 = [−99, −98], I15 = [−96, −95], I14 = [−95, −94], |
| | I1 = [−90, −89], I1 = [−75, −74], I2 = [−59, −55], I13 = [−51, −50], I2 = [87, 88], |
| | L2 = [−71~−70, 75~76], L3 = [−55~−53, 82~83], L5 = [−77~−76, −68~−67], L6 = [−86~−81], L15 = [−46~−32] |
| Struc902 | M = [−49, −44, −7, 0, 6, 15, 34, 42, 49, 57, 60, 82], W = [−29, −18, 2, 12, 45, 47, 64, 69, 95, 100], D = [−21, 37, 88, 89], I3 = [−39, −38], I2 = [93, 94], L2 = [54~55], |
| | L3 = [−15~−13] |
| Struc903 | M = [−71, −61, −56, −49, −42, −39, −21, −19, −17, 0, 25], W = [−68, −26, −10, 4, 16, 24, 26, 33], D = [−91, −90], I2 = [−27, −26], L2 = [−84~−84, −12~−11], L3 = [−65~−63] |
| Struc904 | M = [−23, −16, −6, 18, 24, 26, 29, 43, 64, 79], W = [−20, −8, 34, 63, 74, 78], D = [8, 60, 95, 96, 97, 98, 99], I1 = [11, 12], I1 = [67, 68], L1 = [35~37], |
| | L2 = [49~50, 72~73], L4 = [87~88] |
| Struc905 | M = [−21, 12, 22, 29, 35, 46, 75, 82, 84], W = [−8, −7, 3, 6, 9, 13, 42, 73, 100], D = [−17], L2 = [66~67], L3 = [88~90], L6 = [−13~−12] |
| Struc906 | M = [−24, −8, 0, 9, 61, 64, 72, 90], W = [−17, −3, 3, 25, 26, 41, 68, 82, 84], L2 = [20~21, 29~30, 42~43], L6 = [34~39] |
| Struc907 | M = [−93, −89, −83, −50, −28, −24, 0, 31, 36, 41, 44, 67, 70, 73, 76, 84], W = [−92, −60, −59, −43, −22, −2, 13, 34, 35, 37, 49, 50, 57, 95], D = [−11, 89], |
| | I2 = [−39, −38], L2 = [51~52, 91~92], L3 = [−98~−98, −8~−7], L4 = [−20~−17] |
| Struc908 | M = [−11, −9, −4, 0, 34, 65, 81], W = [−5, 12, 13, 31, 41, 51, 53, 73, 75], D = [−25, −20, 42], I2 = [−17, −16], I14 = [47, 48], I3 = [50, 51], I15 = [56, 57], |
| | L2 = [8~9], L5 = [70~72] |
| Struc909 | M = [−43, −22, 0, 47, 75, 78], W = [−51, −40, −39, −37, −36, −19, 6, 13, 40, 68, 89, 95], D = [38, 90], I6 = [−51, −50], I1 = [21, 42], I1 = [91, 92], L1 = [−16~−11], |
| | L2 = [4~5, 35~36] |
| Struc910 | M = [0, 11, 21, 56, 65, 71, 85, 87, 98], W = [4, 5, 13, 30, 40, 50, 53, 17], D = [44, 96], I1 = [46, 47], I3 = [52, 53], L2 = [6~7, 24~25, 28~29, 36~37, 78~79], |
| | L3 = [90~92] |
| Struc911 | M = [−85, −75, −73, −68, −60, −19, −10, 0, 4, 10, 26, 35, 43, 45, 78, 85], W = [−83, −69, −63, −24, −23, −12, −11, −7, 3, 9, 18, 38], D = [70], L2 = [−32~−31, 98~99], |
| | L5 = [71~75] |
| Struc912 | M = [−80, −56, −43, −13, −5, 0, 8, 39, 44, 59, 63], W = [−94, −83, −82, −75, −74, −64, −63, −54, −38, −37, −34, −22, −19, −18, 6, 38, 45, 52], |
| | D = [−95, −70, −69, −52, 35], I2 = [−75, −14], I1 = [−51, −50], L2 = [67, 68], L2 = [−88~−86, −29~−28, −11~−9, 14~15], L3 = [30~31] |
| Struc913 | M = [−93, −23, 34, 51, 69, 91], W = [−99, −87, −24, −22, 33, 88, 89], D = [−10, −9, −8, −7, 98], I1 = [−15, −15], I1 = [−14, −13], L1 = [−53~−52, 94~96], |
| | L2 = [−61~−60, 12~13, 44~45], L4 = [−86~−83, 14~77] |
| Struc914 | M = [0, 7, 21, 25, 31, 71, 85, 8, 91], W = [−8, 4, 12, 50, 65, 7, 78, 92], L8 = [43~48] |
| Struc915 | M = [−92, −86, −76, −69, −52, −38, −30, −19, −12, 0, 15, 35, 39, 44, 47, 51, 72, 76], W = [−72, −64, −11, −6, 45, 60, 81, 84], D = [−47, −46, −45, −44], |
| | L2 = [−23~−22, 66~67] |
| Struc916 | M = [−17, −13, 29, 42, 46, 52, 72, 74, 78], W = [−23, −21, 18, 3, 9, 21, 25, 26, 73], D = [6, 65], L2 = [67~68, 91~92], L4 = [−2~0], L15 = [97~99] |
| Struc917 | M = [−16, 18, 26, 43, 50, 67, 71, 85], W = [−24, −18, −3, 20, 36, 52, 66, 72, 78], D = [37, 38, 59, 60, 61, 62] |
| Struc918 | M = [−89, −40, −16, 0, 30, 33, 52], W = [−81, −76, −71, −69, −28, −23, −20, −18, −7, 24, 37, 51, 59], D = [41, 42, 43, 44, 45, 46], I10 = [−96, −95], I1 = [−84, −83], |
| | I9 = [−79, −78], I14 = [−75, −74], I4 = [−54, −53], I7 = [−52, −51], |
| | L11 = [−64~−63, −59~−58], L2 = [6~7], L3 = [−86~−86, −26~−24], L4 = [−68~−68, 12~15] |
| Struc919 | M = [29, 52], W = [−20, −19, −7, 5, 20, 33, 42, 43, 54, 67], I10 = [31, 32], I1 = [73, 74], L2 = [−6~−5], L3 = [58~60], L5 = [68~71], L6 = [35~37] |
| Struc920 | M = [−24, −7, 10, 20, 31, 59, 65, 88, 91, 95, 99], W = [−25, −19, −6, −5, 9, 25, 26, 34, 36, 60, 64, 81, 82], I1 = [33, 34], L2 = [−18~−17, 41~42], L5 = [71~75] |
| Struc921 | M = [−44, 0, 6, 11, 14, 19, 24, 36, 53, 71, 75, 87], W = [−52, −34, −33, −28, −5, 26, 30, 40, 50, 57, 76, 78, 79, 85, 86, 88, 94], D = [−30, −29], I1 = [−39, −38], |
| | I14 = [−34, −33], I3 = [65, 66], L1 = [−18~−16, 32~33], L2 = [28~29], L4 = [−13~−11] |
| Struc922 | M = [−11, −2, 29, 66], W = [−16, −8, −3, 3, 10, 24, 25, 26, 37, 47, 51, 55, 60, 73], D = [42], I15 = [50, 51], I15 = [56, 57], L2 = [−7~−6, 8~9], |
| | L3 = [−19~−17, 70~72, 78~80], L4 = [44~46, 86~92] |
| Struc923 | M = [−25, 0, 16, 41, 44, 55, 59, 74, 89, 95, 99], W = [−13, −12, 17, 25, 26, 29, 33, 46, 54, 76, 78], D = [7], I2 = [−28, −27], I3 = [97, 98], L1 = [−34~−32], |
| | L2 = [9~10, 34~38], L3 = [−15~−14], L4 = [−41~−41, 61~64] |
| Struc924 | M = [−95, −92, −84, −71, −66, −58, −50, −21, 0], W = [−56, −55, −43, −41, −39, −24, −23, −19], D = [−8], I1 = [−45, −44], I11 = [−31, −30], I1 = [−10, −9], |
| | L9 = [−87~−86], L2 = [−63~−62, −26~−25], L7 = [−38~−38, 7~13] |
| Struc925 | M = [−76, −53, −44, −20, 3, 12, 65, 70, 83, 86], W = [−78, −71, 4, 45, 78, 99], D = [−30, 29], I5 = [−38, −37], L2 = [35~36, 75~76], L3 = [−10~−8] |
| Struc926 | M = [−93, −76, −70, −64, −59, −46, −39, −24, −21, −19, −10, 0, 49, 57, 74, 89], W = [−98, −90, −83, −75, −38, −12, −11, 26, 35, 44, 51, 52, 66, 68, 84, 99], |
| | D = [−87, −86, −30, 97], L2 = [−54~−53, 12~13] |
| Struc927 | M = [−71, −55, −20, 0, 27, 32], W = [−89, −73, −54, −42, −41, −28, −16, 16, 17], D = [−82, −81, −49], I1 = [−52, −51], L2 = [−32~−31], L3 = [−98~−96, −27~−27] |
| Struc928 | M = [−32, −17, −10, 0, 6, 11, 20, 34, 36, 46, 49, 78], W = [−48, −44, −29, −18, −7, 30, 40, 41, 50, 55, 56, 80, 81], I2 = [−50, −49], I1 = [−40, −39], I1 = [72, 73], |
| | L1 = [−21~−20, 86~93], L2 = [−27~−26, 23~24], L3 = [27~29] |
| Struc929 | M = [−6, 61, 84], W = [5, 23, 26, 42, 43, 54], D = [12], I1 = [7, 8], I7 = [22, 23], I14 = [25, 26], I15 = [42, 43], L2 = [−24~−23, 69~70], L4 = [−11~−8], L5 = [35~36], |
| | L6 = [31~33] |
| Struc930 | M = [−5, 18, 36, 55, 62, 66, 71, 80], W = [−18, −17, −8, −7, 31, 52, 53, 75, 76, 78], D = [42, 91], I1 = [43, 44], I1 = [98, 99], L2 = [20~21, 25~26, 84~85] |
| Struc931 | M = [−11, −8, 29, 32, 65], W = [−9, −5, 4, 35, 48, 67, 73, 76, 77], I6 = [37, 38], I2 = [76, 77], L2 = [20~21, 50~54, 61~62], L3 = [42~44] |
| Struc932 | M = [−15, 4, 21, 25, 38, 42, 49, 60, 66], W = [−20, −19, −17, 20, 35, 46, 78], D = [73], I1 = [75, 76], L1 = [82~84], L2 = [33~34, 91~92] |
| Struc933 | M = [−23, −16, 3, 18, 24, 29, 35, 43, 50, 60, 66, 73, 85], W = [−20, −18, −8, −7, 20, 21, 34, 37, 61, 78, 97], I1 = [12, 13], L1 = [7~8], L2 = [83~84, 91~92] |
| Struc934 | M = [−23, −17, −4, 10, 13, 29, 50, 60, 72, 76], W = [−25, −21, −20, −19, −5, 14, 20, 21, 34, 35, 46, 78, 83, 84, 85], D = [40, 44, 65], I1 = [67, 58], L2 = [37~38] |
| Struc935 | M = [−4, 26, 31, 36, 46, 64, 68, 97, 99], W = [4, 5, 12, 37, 61, 63, 70, 82, 94, 100], D = [10], L3 = [−2~0] |
| Struc936 | M = [−97, −91, −32, −24, −8, 0, 19, 35, 40, 43, 51, 56, 60, 75, 77, 81, 84, 99], W = [−83, −82, −75, −70, −52, −51, −12, −11, 3, 9, 18], I1 = [−38, −37], L1 = [−60~−55], |
| | L2 = [68~69] |
| Struc937 | M = [−19, −17, −3, 0, 15, 34, 70, 94, 99], W = [−21, −15, 4, 12, 43, 59, 60, 66, 67], I11 = [−14, −13], I5 = [−7, −6], L2 = [61~62, 79~80], L4 = [36~39] |
| Struc938 | M = [−49, −42, −39, −31, −17, −6, 0, 12, 28], W = [−98, −94, −90, −77, −75, −67, −43, −33, −23, 24, 26, 33], I13 = [−98, −97], I3 = [−95, −95], I10 = [−71, −70], |
| | I1 = [−24, −23], L1 = [−28~−26], L2 = [−93~−92, −88~−87, −80~−79, −56~−55, 21~22], L4 = [−85~−82, −20~−20] |
| Struc939 | M = [−11, 2, 43, 80], W = [−18, −17, −7, −3, 13, 46, 66], D = [26], I1 = [−24, −23], I11 = [39, 40], I5 = [49, 50], L2 = [−21~−19, 57~58, 72~73], L3 = [28~30, 35~36] |
| Struc940 | M = [−8, 4, 25, 37, 52, 83, 87], W = [−19, −12, 20, 21, 41, 63, 64, 98], I15 = [−23, −22], L6 = [−18~−18] |
| Struc941 | M = [−24, −12, 4, 21, 25, 29, 38, 42, 49, 60, 75, 82, 91], W = [−22, −8, 17, 23, 26, 35, 43, 50, 66, 72, 76], L2 = [33~34, 52~53] |
| Struc942 | M = [−85, −71, −68, −13, −10, 26, 35, 45, 52, 68, 76, 98], W = [−66, −65, −9, 12, 28, 49, 73], L1 = [−37~−29], L2 = [−55~−54, −24~−23, −20~−19] |
| Struc943 | M = [−23, −16, 18, 29, 35, 43, 60, 66, 70, 73, 90], W = [−24, −20, −19, −18, 8, 20, 30, 34, 37, 42, 61, 78, 89], D = [96, 97, 98, 99], L2 = [9~10], |
| | L3 = [24~26, 50~52, 83~84] |
| Struc944 | M = [−21, −7, 0, 4, 6, 17, 34, 61, 75], W = [−54, −35, −34, −17, −9, −8, 21, 33, 43, 79], D = [−16], I1 = [−14, −13], I1 = [26, 27], I1 = [95, 96], L1 = [87~91], |
| | L2 = [11~12, 29~30, 67~68], L3 = [96~98], L4 = [45~45], L5 = [−49~−47] |
| Struc945 | M = [−33, −23, −18, 5, 74, 92, 98], W = [49, 56, 63, 66, 67, 70, 77, 85, 94, 95, 96], D = [57], I2 = [84, 85], L1 = [79~81], L2 = [36~37, 51~54], L3 = [43~45], |
| | L4 = [61~62], L6 = [−5~0] |
| Struc946 | M = [−12, 0, 3, 55, 61, 75, 98], W = [−34, −27, −26, −25, 4, 16, 28, 29, 47, 56, 60, 67, 77, 80, 85, 94, 97], D = [48, 49, 83, 84], I1 = [44, 45], I1 = [51, 52], |
| | I2 = [80, 81], L2 = [36~37, 65~66, 92~93, 95~96], L3 = [−5~−3, 21~23] |
| Struc947 | M = [−61, −57, −52, −39, −34, −8, 0, 3, 5, 16, 36, 48, 65], W = [−67, −42, −30, −24, 27, 41, 44, 47, 66, 72, 73, 83, 84, 91, 92, 95, 96], D = [26], I2 = [31, 32], |
| | L2 = [−29~−28, −26~−25, −15~−14, 21~22, 45~46, 55~56, 78~80] |
| Struc948 | M = [−47, −15, −10, −7, 0, 4, 19, 45, 48, 61, 75, 92], W = [−61, −53, −35, −4, −3, 5, 30, 43, 77, 79, 91], I2 = [−18, −17], L1 = [88~90], L2 = [11~12, 33~34, 67−68], |
| | L4 = [−28~−25] |
| Struc949 | M = [9, 15, 66, 75, 92], W = [34, 35, 37, 53, 78, 83, 84], L2 = [19~20, 29~30, 81~82], L3 = [−10~−8, 42~44] |
| Struc950 | M = [−22, 4, 21, 29, 37, 42, 60, 84, 99], W = [−24, −23, −20, −19, −17, −8, 20, 25, 72, 78], D = [73], I1 = [75, 76], L1 = [33~35], L2 = [49~50, 66~67, 81~82, 91~92] |
| Struc951 | M = [−16, −10, 35, 55, 60, 70, 92, 98], W = [−4, 7, 14, 15, 19, 20, 34, 36, 44, 54, 59], L1 = [77~80], L2 = [12~13, 85~86], L4 = [73~74] |
| Struc952 | M = [−76, −55, −53, −48, −44, −20, 3, 12, 52, 61, 83, 86], W = [−84, −78, −61, 4, 13, 21, 40, 45, 46, 58, 99], D = [71], I1 = [98, 99], L1 = [−36~−35, 27~28], |
| | L2 = [−95~−94, 35~36, 75~76], L3 = [−10~−8, 64~66] |
| Struc953 | M = [−93, −85, −63, −58, −54, −19, −13, 5, 35, 76, 98], W = [−73, −7, 6, 51, 99], D = [−2], L1 = [−33~−29, −5~−4], L2 = [44~45], L3 = [−10~−10, 12~14], L4 = [−71~−68] |
| Struc954 | M = [−82, −62, −56, −40, −37, −33, 49, 51, 55, 64, 97], W = [−78, −68, −57, −46, 24, 38, 72], L1 = [−14~−13], L2 = [−75~−74, 14~15, 18~19], L3 = [27~29] |
| Struc955 | M = [38, 42, 65], W = [−25, −22, −6, 9, 33, 41, 60, 83, 84], D = [53], I1 = [51, 52], L1 = [88~97], L2 = [71~72, 81~82], L3 = [−9~−7], L5 = [28~32] |
| Struc956 | M = [−24, −21, −11, −6, 32, 35, 39, 80], W = [−20, −19, −7, 54, 96, 97], D = [29], I1 = [−13, −12], I6 = [16, 17], I12 = [19, 20], I1 = [24, 25], I1 = [73, 74], |
| | L1 = [65~66], L2 = [56~57] |
| Struc957 | M = [−16, 18, 22, 24, 35, 38, 43, 60, 66, 73], W = [−24, −20, −18, −17, −3, 20, 34, 37, 61, 78, 85, 89], D = [8, 95, 96, 97, 98, 99], I1 = [12, 13], L3 = [50~52], |
| | L4 = [82~84] |
| Struc958 | M = [−21, −11, 39, 52, 80], W = [−23, −20, −18, −17, 24, 66, 92], I11 = [23, 24], I1 = [26, 27], I2 = [32, 33], I1 = [73, 74], L3 = [29~30], L5 = [57~61] |
| Struc959 | M = [0, 25, 35, 37, 42], W = [−13, −12, −8, −2, 20, 21, 26, 43, 53, 14, 84], I12 = [−23, −22], I4 = [−19, −18], L1 = [−6~−5], L2 = [66~67], L3 = [96~98] |
| Struc960 | M = [−16, −10, 0, 42, 60, 70, 80, 83, 92], W = [−4, 14, 15, 20, 21, 30, 34, 35, 36, 37, 54, 76, 17], I1 = [9, 10], L2 = [5~6, 12~13, 85~86] |
| Struc961 | M = [−93, −91, −83, −69, −54, −3, 0, 34, 68, 78, 81, 87, 96], W = [−92, −89, −52, −51, −20, −19, 10, 23, 30, 45, 52, 57, 58, 59], D = [25, 53], L2 = [−7~−6], |
| | L1 = [49, 50], |
| | L1 = [−12~−10], L2 = [−44~−43, −36~−35, 30~31, 43~44, 70~71, 98~99], L3 = [−60~−57], 19~21, 39~41], L4 = [−65~−63] |
| Struc962 | M = [−30, −15, −3, 4, 17, 34, 37, 52, 56, 61, 66, 82, 85, 92], W = [−39, −33, −24, −16, 21, 22, 54, 62, 67, 81], L2 = [−26~−25], L3 = [−12~−10], L5 = [45~49] |
| Struc963 | M = [7, 37, 46, 71, 87], W = [4, 12, 30, 50, 65, 77, 86], D = [98], I3 = [48, 49], L2 = [91~92], L3 = [19~21] |
| Struc964 | M = [−86, −70, −11, 0, 31, 35, 37, 41, 44, 91], W = [−71, −63, −37, −24, −23, −22, −13, 14, 52, 75, 88, 89, 100], D = [−94, −52, −43, −42], I1 = [−93, −92], |
| | L2 = [−8~−7, 73~74, 94~95], L3 = [25~27, 68~70], L4 = [−61~−58, −36~−35, 10~13] |
| Struc965 | M = [−33, 3, 17, 32, 37, 39, 42, 51, 55, 61, 93, 98], W = [4, 16, 28, 38, 49, 56, 60, 67, 77, 94, 95], L2 = [83~84], L3 = [−5~−3, 21~23] |
| Struc966 | M = [−50, −32, −5, 0, 4, 14, 34, 79, 85, 89, 95, 97], W = [−55, −52, −47, −46, −41, −39, −37, −33, −28, −27, 10, 29, 40, 41, 46, 66, 94], D = [−42], I2 = [−28, −27], |
| | I2 = [−25, −24], I1 = [−9, −8], I1 = [38, 39], L2 = [−36~−35, −30~−29, 17~18] |
| Struc967 | M = [40, 64, 72, 76, 81, 86], W = [−20, −19, −17, −7, −3, 3, 17, 33, 41, 68, 70, 71, 73, 74, 84], I1 = [−24, −23], I1 = [15, 16], I2 = [35, 36], I4 = [89, 90], |
| | L2 = [7~9, 20~21, 29~30], L7 = [96~98] |
| Struc968 | M = [−82, −71, −23, −8, −4, −1, 6, 48, 56, 62, 88], W = [−80, −75, −74, −26, −20, −12, 20, 26, 33, 59, 60, 86, 95], D = [−61, −60, −59, −58, −57, −56, −55, −54, −53, 41, |
| | 42, 45], I8 = [−27, −26], I1 = [70, 71], L4 = [−36~−33] |
| Struc969 | M = [18, 3, 42, 62, 97], W = [−16, −11, 36, 51, 52, 5, 65, 78], D = [−15, −9], I6 = [−19, −18], I9 = [−1, 0], L1 = [7, 8], L1 = [49, 50], I15 = [51, 52], I15 = [56, 57], |
| | I15 = [65, 66], I9 = [67, 68], I15 = [74, 75], I1 = [92, 93], L9 = [79~87], L2 = [29~30], L3 = [1~2, 10~13], L4 = [70~71] |
| Struc970 | M = [−89, −85, −70, −66, −18, 0, 33, 36, 61, 65], W = [−86, −84, −82, −72, −71, −69, −28, −27, −20, −11, −10, 11, 24, 51, 59], D = [−16], I1 = [−20, −19], L1 = [6~8], |
| | L2 = [44~45], L6 = [11~15] |
| Struc971 | M = [−35, −17, 0, 7, 74], W = [−45, 1, 5, 6, 47, 64], D = [35, 36, 37, 38, 39, 40], I3 = [−63, −62], I2 = [−56, −55], I1 = [−45, −44], I1 = [68, 69], I1 = [69, 70], |
| | L1 = [92~98], L2 = [22~23, 29~30], L4 = [76~79] |
| Struc972 | M = [−55, −35, −26, −22, −11, −3, 0, 4, 29, 47, 69, 91, 96], W = [−53, −44, −12, 10, 11, 19, 78, 89], D = [−31], I1 = [−34, −33], I12 = [27, 28], I14 = [33, 34], |
| | I15 = [35, 36], |
| | I15 = [36, 37], I13 = [37, 38], I15 = [38, 39], I12 = [40, 41], L2 = [−69~−68, −65~−64, −61~−60, −18~−17], L7 = [20~21] |
| Struc973 | M = [−23, −6, 2, 24, 29, 58, 61, 70, 84], W = [−18, −15, −14, −11, −7, 5, 20, 42, 43, 54, 62, 64, 67], D = [−20], I2 = [−18, −17], I4 = [−15, −14], I1 = [−11, −10], |
| | I7 = [37, 38], L2 = [6~7], L11 = [31~35], L4 = [74~75] |
| Struc974 | M = [−22, 9, 18, 32, 60, 62, 65, 71, 78, 85], W = [−18, −17, 1, 20, 21, 23, 36], D = [42], I1 = [−5, −5], I1 = [43, 44], I1 = [76, 77], L10 = [98~99], L3 = [−9~−8], |
| | L13 = [91~92] |
| Struc975 | M = [−77, −52, −48, −43, −38, −32, 5, 17, 27, 44, 57], W = [−72, −71, −70, −67, −62, −60, −56, −54, −47, −28, −19, −18, −13, −5, 6, 29, 33, 49, 55, 55, 58, 90, 91], |
| | I2 = [−21, −20], I1 = [36, 37], L8 = [−69~−69], L1 = [−26~−24, 31~32], L2 = [−65~−64, −15~−14, 47~48], L3 = [−59~−59, 0~2] |
| Struc976 | M = [0, 9, 29, 48, 63, 83], W = [−37, −36, −31, −27, −26, 5, 30, 53, 61, 82, 87, 94], I4 = [−40, −39], I15 = [−31, −30], I6 = [−27, −26], I1 = [−21, −20], |
| | L2 = [11~12, 41~42, 51~52, 96~97], L3 = [−35~−34], L4 = [16~19, 33~36], L5 = [−13~−12] |
| Struc977 | M = [−47, −43, −26, 0, 5, 21, 29, 33, 37, 93, 97], W = [−44, −33, 10, 19, 31, 81, 86, 89], L2 = [11~12, 68~69, 90~91], L4 = [44~47] |
| Struc978 | M = [−15, 4, 34, 73, 82, 92, 96], W = [−40, −39, −24, −8, 21, 22, 62, 67, 71, 81, 93], I1 = [−30, −29], I11 = [−8, −7], I8 = [−1, 0], |
| | L2 = [−26~−25, −12~−11, 37~38, 65~66, 84~85], L3 = [−36~−34, −3~−3, 47~49] |
| Struc979 | M = [−23, −18, 15, 26, 29, 60, 76, 81], W = [−20, −17, 1, 4, 25, 27, 35, 51, 78, 84], D = [65], I1 = [67, 68], L2 = [19~20, 33~34, 52~53], L3 = [42~44, 71~73] |
| Struc980 | M = [6, 19, 23, 50, 63, 81], W = [3, 25, 26, 41], D = [29], I1 = [32, 33], L2 = [73~74], L3 = [35~36] |
| Struc981 | M = [−71, −68, −13, −10, −8, −2, 3, 35, 45, 52, 93, 98], W = [−66, 51, 69, 91, 99], D = [75], I1 = [76, 77], L1 = [−31~−29, −24~−23], L2 = [−47~−45, −20~−19], |
| | L4 = [−91~−85, −55~−52] |
| Struc982 | M = [−64, −57, −51, −44, −41, −33, −31, −27, 7, 28], W = [−75, −58, −56, −37, −28, −26, −24, −11, 5, 29], D = [−93], I1 = [0, 1], I2 = [33, 34], |
| | L2 = [−71~−70, −67~−66, 15~17], L3 = [−8~−5], L4 = [−85~−83] |
| Struc983 | M = [−17, 6, 9, 15, 34, 37, 40, 47, 52, 57, 64, 76], W = [−20, −8, 7, 45, 72, 77, 83, 88, 89], D = [−13, −12, −11, −10], L2 = [69~70] |
| Struc984 | M = [−80, −62, 0, 2, 7, 10, 16, 57], W = [−95, −68, −55, −54, −43, −29, −24, 21, 50, 53, 61, 63, 89], I12 = [63, 64], I2 = [71, 72], L1 = [−85~−84], L2 = [−13~−12, 31~38], |
| | L3 = [−32~−30], L5 = [−75~−14] |
| Struc985 | M = [−2, 0, 5, 17, 26, 34, 51, 80, 92], W = [22, 61, 86, 87], D = [30], I1 = [44, 45], I2 = [58, 59], L3 = [70~72] |
| Struc986 | M = [−82, −67, −35, 7, 22, 31, 23, 50, 56, 96], W = [−86, −85, −81, −52, −26, −9, −8, 3, 14, 27, 28, 29, 41, 66, 72, 95], D = [−57, −56, −51, −50, −49], I6 = [−91, −90], |
| | I4 = [−29, −28], I13 = [−27, −26], I15 = [−26, −25], I1 = [−19, −18], I15 = [−16, −15], I1 = [67, 58], L4 = [73~14], L7 = [−7~−6, 77~81] |
| Struc987 | M = [−50, −44, −42, −17, −14, 0, 3, 8, 17, 40, 58, 72, 91], W = [−33, −6, −5, 6, 9, 11, 26, 37, 39, 52, 61, 69, 99], I1 = [−10, −9], L2 = [77~84, 95~96], L3 = [64~66], |
| | L5 = [46~50] |
| Struc988 | M = [−97, −94, −44, −37, −33, −31, −22, −10, 1, 11, 18, 31, 32], W = [−98, −84, −50, −41, −40, −29, −28, −18, −16, −9, −8, −2, 7, 9, 27, 41], L2 = [−86~−85], |
| | L3 = [−75~−73], L4 = [−62~−59] |
| Struc989 | M = [0, 26, 55, 57, 63, 79], W = [−24, −19, −18, −17, −14, 35, 76], I1 = [−17, −16], I8 = [31, 32], L2 = [7~8, 16~17, 42~43, 93~94], L5 = [−10~−10] |
| Struc990 | M = [−71, −33, −16, −12, −7, 0, 7, 10, 29, 34, 56], W = [−66, −64, −63, −38, −11, −9, 31, 44, 52, 55], D = [−60] |
| Struc991 | M = [−97, −75, −55, −33, −6, 58], W = [−98, −86, −56, −15, 13, 17], I3 = [−89, −88], L1 = [−24~−23], L2 = [−82~−78, −38~−37, 8~9, 44~45], L3 = [−70~−69] |
| Struc992 | M = [−22, −18, −7, 13, 19, 54, 56, 61, 64, 74], W = [−31, −30, −27, 2, 7, 48, 55, 60, 68, 70, 92], L10 = [33~34], L2 = [79~80] |
| Struc993 | M = [−98, −65, −62, −59, −47, −44, −37, −34, −19, −17, −12, −4, −1, 29, 39, 56, 89], W = [−80, −60, −52, −6, 5, 19, 20, 32, 49, 70], I1 = [−26, −25], L1 = [−73~−71], |
| | L2 = [33~34, 96~97], L3 = [−55~−53, 6~8, 58~60], L4 = [−30~−27], L6 = [−79~−76] |
| Struc994 | M = [−22, −13, 5, 13, 23, 43, 46, 53, 56, 61, 67, 80, 82, 88], W = [−32, −31, 1, 7, 30, 51, 55, 68], D = [−7, 34, 35], I11 = [39, 40], I1 = [85, 86], L2 = [−18~−17, 18~19], |
| | L3 = [−30~−26] |
| Struc995 | M = [−79, −67, −64, −20, 4, 17, 28, 65, 70, 92], W = [−93, −86, −83, −65, −49, −43, −42, −33, −11, 2, 7, 8, 20, 31, 34, 47, 58, 63, 79, 95], D = [−36, −35, 48, 49, 50, |
| | 51, 54], I1 = [−31, −30], L2 = [−97~−96, −76~−75, −10~−9, −1~0, 40~41], L3 = [−28~−27] |
| Struc996 | M = [−87, −62, −43, −23, −18, −9, −4, 0, 5, 9, 13, 65, 70], W = [−95, −70, −63, −61, −56, −49, −36, −35, −30, −27, −26, −21, −20, −15, −10, −8, 7, 38, 63, 71, 83], |
| | D = [−93, −92], I3 = [−81, −80], L1 = [−73~−72, −68~−66, 75~79], L2 = [25~26], L5 = [48~52] |
| Struc997 | M = [−72, −46, −40, −32, −26, −9, 0, 7, 20], W = [−95, −90, −85, −79, −77, −70, −41, −17, −15, −14, −10], D = [−21], I1 = [−25, −24], I1 = [5, 6], |
| | L2 = [−93~−92, −54~−53, −6~−5], L3 = [−64~−64], L4 = [−88~−88], L13 = [−84~−80] |
| Struc998 | M = [−26, −22, −18, 8, 13, 54, 56, 61, 64], W = [2, 37, 48, 53, 55, 60, 68, 70, 92], D = [86, 87, 88], I1 = [−12, −11], I1 = [36, 37], L10 = [33~34], L2 = [−7~−6, 73~81], |
| | L3 = [16~18] |
| Struc999 | M = [−77, −67, −35, −30, −28, −12, −9, 7, 56, 71, 88, 98], W = [−60, −54, −26, −8, 3, 14, 20, 27, 28, 95], D = [−57, −56], I12 = [−93, −92], I1 = [−17, −16], I1 = [65, 65], |
| | L1 = [−51~−48, 40~41], L2 = [−82~−82, 29~30, 49~50], L3 = [−88~−85], L4 = [73~14, 77~78], L7 = [−7~−6] |
| Struc1000 | M = [−84, −82, −75, −67, −35, −28, 5, 17, 23, 56, 71, 7, 81, 96], W = [−90, −79, −26, −25, −9, −8, 3, 14, 29, 41, 44, 91, 95], I1 = [65, 66], I6 = [73, 74], L1 = [−50~−48], |
| | L2 = [−57~−53, −19~−19, 49~50], L7 = [−7~−6] |
| Struc1001 | M = [−82, −77, −70, −67, −48, −38, −35, −29, −22, −10, −3, 25, 31, 38, 56], W = [−85, −85, −42, −8, 3, 14, 27, 30, 41, 73, 86, 92], I6 = [−91, −90], I1 = [−17, −16], |
| | I1 = [65, 66], L1 = [−60~−55], L2 = [−26~−24], L3 = [−32~−31], L5 = [49~50, 77~81], L7 = [−7~−6], L8 = [69~71] |
| Struc1002 | M = [−31, 0, 27], W = [−54, 18, 21], L2 = [−46~−46, −7~−6], L4 = [9~12] |
| Struc1003 | M = [−22, −16, 0, 5, 42, 50, 55, 63, 79, 87], W = [14, 28, 32, 61, 62, 76, 96], D = [8], I1 = [12, 13], I8 = [38, 39], L2 = [15~16, 35~36], L3 = [−10~−10, 92~94] |
| Struc1004 | M = [18, 20, 25, 97], W = [5, 6, 43, 78], D = [48, 60, 61, 75], I1 = [72, 73], I8 = [99, 100], L1 = [81~85], L2 = [−1~0], L4 = [51~54, 89~93] |
| Struc1005 | M = [−98, −96, −92, −71, −54, −49, −27, −6, 0, 6, 34, 40], W = [−93, −63, −62, −50, −40, −32, −7, −5, 9, 36, 43, 44], D = [−83, −82, −60, 21], I1 = [32, 33], |
| | L2 = [−20~−17, −10~−9], L3 = [−65~−64] |
| Struc1006 | M = [−85, −62, −57, −31, −16, −10, 1, 13, 31], W = [−73, −72, −61, −50, −41, −40, −39, −32, −18, −9, −8, 7, 21, 22, 29, 41], L6 = [−97~−92] |
| Struc1007 | M = [−25, 0, 13, 16, 19, 22, 96], W = [−73, −71, −70, −68, −66, −64, −62, −60, −58, −39, −19, −9, −8, −7, 35, 38, 43, 65, 73, 87, 95], D = [−36, −35], I5 = [−69, −68], |
| | I6 = [68, 69], L2 = [−29~−28, 4~5, 41~42, 50~51, 74~80, 88~89], L4 = [31~34] |
| Struc1008 | M = [−95, −80, −70, −36, −30, −10, 0, 2, 7, 13, 20, 30, 44, 50, 63, 73, 88, 90, 95], W = [−94, −93, −85, −48, 10, 17, 28, 32], D = [−6, −5], L2 = [−76~−76, 79~80], |
| | L4 = [−67~−64], L5 = [37~41] |
| Struc1009 | M = [0, 63, 70, 75], W = [7, 8, 18, 38, 45, 48, 53, 58, 73, 79, 86, 100], L2 = [10~11, 46~47], L4 = [35~36], L6 = [31~32] |
| Struc1010 | M = [−74, −57, −49, −44, −12, 0, 3, 45, 48, 90], W = [−99, −98, −95, −79, −52, −51, 2, 29, 57, 63, 84], D = [−88, −87], I1 = [−19, −18], I3 = [−9, −8], I12 = [57, 58], |
| | I2 = [99, 100], L2 = [−64~−63, 68~69, 94~95], L6 = [54~55] |
| Struc1011 | M = [−82, −77, −74, −50, −43, −28, −10, 50, 56], W = [−46, −26, −25, −9, −8, 3, 7, 14, 25, 29, 41, 44, 79, 80, 82, 95], D = [−68, −67, −64, −63, −62, 30, 31, 32], |
| | I6 = [−91, −90], I3 = [40, 41], I1 = [65, 66], I5 = [81, 82], L2 = [−36~−35, −19~−19], L4 = [73~76], L7 = [−7~−6] |
| Struc1012 | M = [−41, −31, 0, 2, 7, 12, 44, 55, 68, 91], W = [−46, −38, −25, −13, −9, −8, 51, 16, 85, 86], D = [−50, 24, 27, 28, 29, 33, 34, 35], I1 = [−35, −34], L3 = [77~79], |
| | L7 = [−60~−53] |
| Struc1013 | M = [−58, −46, −3, 13, 38, 52, 90], W = [−27, −19, −16, −15, −5, 5, 34, 70, 71, 76, 81], D = [79, 80], I2 = [83, 84], L2 = [−62~−61, 30~31, 65~67], L4 = [58~61] |
| Struc1014 | M = [−85, −81, −46, −40, −36, −10, 6, 25, 33, 42, 56, 65, 85, 88, 96], W = [−98, −80, −72, −42, −32, −29, −24, −4, 4, 12, 22, 50, 53, 55, 57, 94, 95], D = [−67, −64], |
| | I3 = [−30, −29], L2 = [−1~0, 58~59], L3 = [−71~−70, −61~−60, 46~48], L4 = [−54~−51, 38~39] |
| Struc1015 | M = [−94, −91, −62, −46, −38, 0, 2, 11, 21, 53, 61], W = [−71, −60, −41, −31, 22, 24, 25, 51], D = [−11, −10, −9, −8, −7, −6, −5, −4], I1 = [−82, −81], |
| | L2 = [−77~−76, −51~−50, 46~47] |
| Struc1016 | M = [13, 16, 29], W = [2, 33], L13 = [−6~−6] |
| Struc1017 | M = [−30, −9, 0, 14, 20, 37, 71, 95], W = [−28, −23, −22, −12, 25, 33, 39, 40, 47, 60, 86], L2 = [29~32, 78~79] |
| Struc1018 | M = [−73, −58, −54, −39, −30, 4, 8, 30, 65, 80], W = [−84, −60, −59, −53, −41, −31, −29, −10, 11, 27, 29, 31, 44, 71, 73, 79, 94], I5 = [−80, −79], L8 = [−76~−76], |
| | L2 = [−86~−85, −25~−24, −13~−12], L5 = [−93~−92] |
| Struc1019 | M = [−38, −24, −2, 0, 19, 26, 33], W = [−44, −41, −31, −30, −23, −20, −5, 4, 11, 32, 66, 69, 77, 78, 96], D = [−27], I1 = [−34, −33], I1 = [17, 18], L1 = [57~58, 67~68], |
| | L2 = [−63~−62, −47~−46, −9~−8, 50~51, 74~75], L3 = [−14~−12, 87~89], L5 = [60~64], L7 = [35~38] |
| Struc1020 | M = [−80, −70, −67, −64, −55, −36, −30, −7, 7, 20, 30, 40, 50, 74, 80, 88, 95], W = [−94, −78, −57, −56, −48, −31, −24, −15, −14, 26, 29, 32, 64], D = [−85], |
| | I1 = [−87, −86], L2 = [−76~−76] |
| Struc1021 | M = [−93, 21, 25], W = [−95, −51, −50, −48, −33, −26, 5], D = [−17, −76, −75, −74, −73, −72, −71, −70, −69, −66], I7 = [−30, −29], L2 = [−83~−82, −25~−24, −1~0], |
| | L3 = [−44~−42] |
| Struc1022 | M = [0, 44, 84], W = [3, 28, 58, 59, 90], D = [33, 34, 35], I13 = [89, 90], L2 = [49~50, 53~54, 73~74], L3 = [6~7, 92~94], L5 = [61~67] |
| Struc1023 | M = [−91, −67, −49, −36, 0, 4, 23, 31, 52], W = [−92, −59, 2, 11, 21, 30, 45], D = [−18, 44], I4 = [14, 15], I1 = [39, 40], L8 = [−43~−42], L2 = [−97~−95, −70~−69, 33~34], |
| | L3 = [−7~−5] |
| Struc1024 | M = [2, 20, 66, 90], W = [5, 6, 15, 16, 27, 34, 43, 49, 57, 60, 80, 95, 96], D = [41], I4 = [56, 57], L2 = [44~48] |
| Struc1025 | M = [−46, −2, 5, 35, 39, 45, 47], W = [−25, −19, −16, −5, 7, 27, 34, 44, 61, 68, 70, 79, 80], D = [−9, −8, 57], I1 = [62, 63], |
| | L2 = [15~16, 21~22, 30~31, 66~67, 82~83, 89~90, 94~95] |
| Struc1026 | M = [−6, 0, 2, 11, 57], W = [7, 16, 18, 40, 60, 84, 88, 91], D = [37, 38, 67, 85, 86, 87, 97], I2 = [46, 47], L2 = [42~43], L4 = [61~64] |
| Struc1027 | M = [29, 42, 45, 58, 68, 73, 87], W = [−26, −19, −12, 5, 15, 16, 31, 32, 36, 69, 71, 79, 80, 86, 96], I1 = [−10, −9], L2 = [37~38], L3 = [62~64], L7 = [−18~−17] |
| Struc1028 | M = [−48, −33, −25, −7, 0, 8, 10, 29, 32, 34, 54, 63], W = [−95, −92, −90, −81, −66, −64, −38, −24, −11, −9, 31, 52], D = [−58], I8 = [−90, −89], L2 = [−72~−71, −16~−15] |
| Struc1029 | M = [−19, −17, 0, 37, 39, 45], W = [−94, −64, −63, −41, −32, −25, −15, −10, −9, 13, 43], L2 = [−4~−3], L5 = [−55~−51] |
| Struc1030 | M = [−73, −57, −39, −28, −19, −11, −8, 3, 14, 23, 83, 85], W = [−75, −72, −27, 9, 20, 26, 49, 51, 55, 70, 75, 93, 94], I1 = [−65, −64], L1 = [−88~−87, 31~34], |
| | L2 = [−82~−79, 56~57, 68~69], L3 = [−70~−67, −50~−48], L5 = [37~40] |
| Struc1031 | M = [−38, −6, 0, 26, 31, 43, 55, 61, 66, 78, 86, 92], W = [−66, −61, −48, −31, −9, −8, 68, 77], L2 = [11~12, 34~35, 98~99], L4 = [−30~−27] |
| Struc1032 | M = [−96, −69, −63, −43, −33, −27, −25, 0, 2, 7, 30, 42, 46, 19], W = [−36, −12, 3, 28, 31, 61, 62], I1 = [−75, −14], I3 = [−23, −22], L1 = [−52~−50], L2 = [−57~−55], |
| | L4 = [−66~−65] |
| Struc1033 | M = [−97, −38, −35, −28, −21, 0, 24, 27, 40], W = [−90, −64, −31, −30, −16, 18, 26, 29], D = [−79], L2 = [−6~−5] |
| Struc1034 | M = [−98, −95, −88, −82, −66, −63, −29, −11, −5, 0, 21, 24, 39, 43, 64, 70, 85], W = [−76, −70, −65, −38, −33, −32, −25, −21, −20, −10, 12, 13, 18, 28, 31, 38, 55, 61, 62, |
| | 79, 99], I3 = [−49, −48], I2 = [89, 90], L2 = [−74~−73, −56~−55, −23~−22, 56~57] |
| Struc1035 | M = [−79, −61, −18, 6, 31, 57, 60], W = [−84, −83, −60, −39, −12, −5, 11, 39, 54, 61, 71], D = [−54, −53, −52, −51, −50, −49, −48, −47, −46, −45, −44, −43], I4 = [−95, −94], |
| | I5 = [24, 25], L9 = [64~65], L2 = [−38~−34, 72~73], L3 = [−70~−68, −2~0] |
| Struc1036 | M = [−63, −46, −20, −2, 0, 21, 47], W = [−53, −16, −15, −8, −5, 7, 8, 20, 34, 70, 81], D = [79, 80], I2 = [83, 84], L2 = [30~31, 38~39], L3 = [−26~−24, 58~61] |
| Struc1037 | M = [−97, −78, −75, −72, −55, −36, −33, −29, −8, −5, 5, 9], W = [−98, −93, −86, −63, −56, −46, −41, −15, −14, 1, 3, 4, 13, 30, 31, 34, 36, 45, 46, 48], D = [43, 44], |
| | I6 = [−62, −61], L1 = [−24~−23], L3 = [−89~−87] |
| Struc1038 | M = [−91, −78, −52, −47, −14, 10, 19, 29, 36, 48, 52, 98], W = [−94, −64, −50, −34, −26, −2, 25, 26, 30, 43, 68, 78, 82], I1 = [70, 71], I1 = [74, 75], |
| | L2 = [−66~−65, −38~−37], L6 = [84~88] |
| Struc1039 | M = [−61, −5, 0, 31, 34, 51, 57, 71], W = [−45, −42, −39, −34, −31, −27, −9, 4, 33, 56, 68, 75, 88], D = [−33], L2 = [−45~−47, −13~−12, 12~13, 24~25, 54~65], L4 = [−56~−54] |
| Struc1040 | M = [−40, −37, −24, −8, 0, 5, 18, 21, 25, 41, 49, 64, 67], W = [−43, −30, −14, −10, −4, 23, 29, 53, 79], D = [80], I12 = [−43, −42], L2 = [69~72], L3 = [−50~−48], |
| | L4 = [−34~−33] |
| Struc1041 | M = [−38, −35, −21, 0, 11, 13, 24, 26, 40, 43, 46, 66, 71, 75, 78, 88, 99], W = [−48, −47, −46, −39, −31, −29, −9, 77], D = [−28], L2 = [−7~−6, 33~34] |
| Struc1042 | M = [−92, −85, −64, −55, −45, −43, −38, −28, −19, 0, 9, 21], W = [−96, −95, −57, −56, −32, −6, 15, 61, 69, 72, 18, 92], D = [70, 71, 76, 77], I1 = [−80, −79], |
| | L2 = [−69~−68, −53~−52, 53~54], L4 = [29~32] |
| Struc1043 | M = [−95, −91, −88, −82, −66, −48, −36, −5, 39, 85], W = [−81, −70, −65, −38, −35, −20, −13, −10, 12, 13, 18, 28, 31, 32, 58, 61, 79, 99, 100], D = [−22, −21], |
| | I2 = [−25, −24], I2 = [61, 62], L1 = [64~66], L2 = [−75~−74, −56~−55, −29~−28, 56~57], L3 = [90~91] |
| Struc1044 | M = [−76, −70, −50, −40, −34, −32, −7, −5, 0, 23, 35, 39, 72], W = [−43, −19, −4, 21, 24, 54, 55], I1 = [−82, −81], I3 = [−30, −29], L1 = [−59~−57], L2 = [−64~−62], |
| | L4 = [−73~−12] |
| Struc1045 | M = [−95, −91, −54, −51, −38, −33, −9, −6, 27, 32], W = [−85, −77, −66, −60, −56, −49, −47, −34, 21, 23, 38, 40, 44], D = [−67, −46, −45, −44, −43, −42], I1 = [−20, −19], |
| | I1 = [43, 44], L2 = [−21~−21, −18~−17], L3 = [−79~−78, −72~−70, −30~−28] |
| Struc1046 | M = [−28, −23, −8, 0, 11, 17, 33, 70, 73, 78, 88, 96], W = [−39, −38, −25, −20, −18, −9, 12, 39, 55, 59, 85, 90], D = [−45, −44] |
| Struc1047 | M = [−3, 13, 26], W = [7, 16, 18, 30, 38, 60, 74], D = [84, 85, 86, 87, 88, 89, 90], L1 = [67~68], L2 = [41~42, 45~46] |
| Struc1048 | M = [−74, −58, −34, −5, 0, 45, 50, 53, 55, 81], W = [−98, −75, −72, −70, −68, −46, −24, 37, 41, 54, 58, 65, 69, 86], D = [−38, 74, 75], I1 = [−66, −65], I1 = [−37, −36], |
| | I1 = [10, 11], L2 = [−9~−8], L3 = [−14~−12, 34~36] |
| Struc1049 | M = [−78, −60, −55, −48, −22, −14, 92], W = [−81, −73, −72, −70, −64, −38, −33, −10, 4, 21, 22, 31, 32, 39, 44, 45, 61, 79, 86, 91], I1 = [−34, −33], I2 = [89, 90], |
| | L1 = [−37~−36], L2 = [−96~−95, −89~−88, −75~−74, −66~−65, −5~−4, 56~58, 63~64], L5 = [−30~−29] |
| Struc1050 | M = [5, 29, 62, 71, 80, 98], W = [−8, 32, 77, 83, 86, 95, 96], D = [11], I13 = [36, 37], L1 = [40~42], L2 = [−1~0, 65~66], L3 = [46~48] |
| Struc1051 | M = [−64, −60, −55, −35, −25, −14, 0, 35], W = [−99, −61, −51, −48, −45, −39, −30, −19, −17, −15, −5, 27, 37, 40, 44], D = [−75, −74, −71, −70], I9 = [−84, −83], |
| | L2 = [−47~−46, −9~−8, 22~23], L3 = [−57~−57, −23~−20] |
| Struc1052 | M = [0, 11, 20, 66, 85], W = [6, 9, 10, 15, 27, 43, 46, 48, 49, 50, 55, 60, 75, 76, 80, 86], D = [41], I1 = [47, 48], L1 = [90~91], L2 = [2~5, 44~25] |
| Struc1053 | M = [−28, −7, 8, 17, 25, 31, 78, 92, 96], W = [−44, −39, −38, −9, 23, 24, 55, 56, 68, 75, 85, 90], L2 = [−47~−46, −1~0, 11~12, 33~34, 87~88] |
| Struc1054 | M = [−78, −22, −14, 38, 51, 67, 92, 96], W = [−92, −91, −80, −50, −49, −46, −34, −5, 11, 21, 73], I5 = [82, 83], L2 = [−43~−42, 17~18, 24~25], L3 = [−39~−37] |
| Struc1055 | M = [−45, −38, −10, −6, 32, 43], W = [−94, −90, −85, −64, −62, 23, 28, 38, 40], D = [−79], I1 = [−19, −18], I1 = [40, 41], L2 = [−54~−53, −17~−17, −1~0], L3 = [−30~−28] |
| Struc1056 | M = [−58, −45, −40, −20, −9, −3, 0, 11, 25], W = [−90, −86, −85, −62, −49, −46, −30, −5], I6 = [−29, −28], L3 = [−56~−54] |
| Struc1057 | M = [−89, −86, −66, −23, −20, −6, −1, 11], W = [−57, −52, −49, −15, −14, 21, 26, 28], D = [−81, −80], I6 = [−29, −28], I7 = [31, 32], L2 = [−98~−97], |
| | L3 = [−74~−72, −56~−54, −47~−45] |
| Struc1058 | M = [−67, −63, −53, −44, −31, 0, 15], W = [−76, −51, −47, −33, −28, −2, 1, 17, 37, 38, 40], D = [−91, −79, −70, −59], I1 = [45, 46], I8 = [−21~−16], |
| | L3 = [−95~−94, −74~−74] |
| Struc1059 | M = [−65, −62, −55, −53, −44, −37, −34, −12, 16, 29, 34, 39, 60, 65, 71, 85, 83], W = [−98, −80, −60, −52, −48, 4, 19, 33, 53, 55, 56, 78], I1 = [−26, −25], |
| | L2 = [−29~−28, −1~0, 47~48, 81~82], L3 = [−73~−71], L4 = [−79~−76, 92~97] |
| Struc1060 | M = [−92, −88, −83, −56, −51, −44, −6, 3, 10, 14, 21, 58, 94], W = [−95, −80, −74, −73, −71, −69, −57, −50, −46, 46, 50, 64, 84, 86, 98], |
| | D = [−68, −11, 72, 73, 74, 75, 76, 37, 78, 79, 80, 81, 82, 83], I1 = [−9, −8], L1 = [−21~−20], L2 = [−75~−75, −24~−24, −1~0, 38~39], L3 = [−97~−96] |
| Struc1061 | M = [−95, −91, −73, −61, −14, 1, 18, 36, 52, 85], W = [−94, −64, −50, −49, −34, −33, −26, −20, 25, 26, 42, 50, 51], D = [−39, −36, −35], I1 = [70, 71], L2 = [−66~−65], |
| | L4 = [−47~−47] |
| Struc1062 | M = [−78, −53, −48, −38, −29, −8, −5, 8, 2, 31, 4, 61], W = [−59, −11, 16, 17, 21, 24, 25, 46, 55, 59, 70], D = [−64, −63, 52], I1 = [−93, −92], I3 = [−83, −82], L1 = [72~79], |
| | L2 = [−25~−24, −17~−16, −1~0], L3 = [−58~−58, 56~58], L5 = [−72~−68] |
| Struc1063 | M = [−56, −46, −41, −39, −34, −32, −8, 0, 16, 30, 69], W = [−81, −80, −61, −57, −15, 18, 25, 34, 56, 63], D = [−69, −68, 55], I1 = [−25, −24], I11 = [−19, −18], |
| | I15 = [−17, −16], I2 = [−16, −15], I1 = [−13, −12], I15 = [−12, −11], I5 = [34, 35], I11 = [37, 38], L2 = [−77~−76] |
| Struc1064 | M = [−65, −54, −42, −32, 0, 35], W = [−99, −97, −92, −78, −72, −49, −46, −45, 27, 37], D = [−16, −9], I2 = [−84, −83], I1 = [−6, −5], L1 = [−22~−19] |
| Struc1065 | M = [−59, −46, −16, 0, 8, 78, 89], W = [−53, −52, −25, −24, −19, −5, 28, 34, 70, 80, 81], I1 = [46, 47], L2 = [−28~−27, −11~−10, 38~39], L10 = [52~61], L4 = [30~33] |
| Struc1066 | M = [−1, 7, 18, 36], W = [−38, −35, −33, −32, −14, −11, −4, 6, 31, 44, 45, 63, 67, 69], I7 = [64, 65], L2 = [−37~−36, 11~12, 58~59, 72~73], L7 = [24~30] |
| Struc1067 | M = [−98, −84, −81, −49, 0, 23, 43, 56], W = [−92, −91, −70, −47, 16, 30, 31, 40, 44], I5 = [−44, −43], I1 = [−42, −41], L2 = [33~34], L3 = [−7~−5] |
| Struc1068 | M = [−62, −46, −39, −35, −2, 27, 45, 51, 56, 71], W = [−68, −44, −34, −21, −19, −16, −9, 11, 23, 24, 87], D = [17, 31, 32, 33, 41, 73], I1 = [−37, −36], I1 = [15, 16], |
| | L2 = [−31~−30, 77~78, 88~89, 95~96], L3 = [35~37, 67~68] |
| Struc1069 | M = [−50, −44, 0, 3, 17, 44, 61, 81, 84], W = [−38, −18, −8, 4, 11, 16, 23, 26, 30, 42, 78, 90, 98], D = [34, 35, 39, 40, 41], I1 = [28, 29], I5 = [66, 67], I2 = [89, 90], |
| | L2 = [−42~−41], L6 = [20~21, 47~49] |
| Struc1070 | M = [−7, −1, 13, 35, 61, 70, 74, 84, 94], W = [−30, 7, 12, 30, 33, 37, 48, 53, 68, 83, 92, 93, 35], I1 = [−20, −19], I2 = [−13, −12], I8 = [29, 30], I1 = [33, 34], |
| | L1 = [−29~−27], L2 = [55~56], L4 = [−24~−23] |
| Struc1071 | M = [−91, −86, −71, −56, −23, −11, 3, 14, 34, 44, 61, 99], W = [−72, −25, −24, −21, −20, −13, 9, 12, 13, 15, 18, 28, 37, 49, 55, 63, 75], D = [83, 85], I1 = [−45, −45], |
| | L1 = [87~89], L2 = [−96~−96, −65~−64, 39~40, 56~57, 92~93], L3 = [−34~−32] |
| Struc1072 | M = [−53, −39, −7, 0, 9, 27], W = [−8, 12, 17, 20], D = [18], I1 = [23, 24], L2 = [−47~−46], L4 = [−31~−28] |
| Struc1073 | M = [−96, −94, −58, −44, −40, −37, −26, −21, 0], W = [−62, −51, −47, −10], D = [−17, −16], I1 = [−81, −80], L2 = [−6~−5], L3 = [−32~−30] |
| Struc1074 | M = [−41, −25, −1, 23, 29, 48, 68, 71], W = [−43, −31, −30, −5, 33, 42, 55, 56], D = [88, 89, 90, 91], I2 = [81, 82], L1 = [75~77], L2 = [−47~−46] |
| Struc1075 | M = [−89, −72, −64, −58, −51, −37, −26, 23], W = [−95, −82, −80, −79, −17, −10, 12, 25], D = [−94], L2 = [−91~−91, −33~−32] |
| Struc1076 | M = [−29, −23, −9, 58, 97], W = [−31, −4, 2, 16, 66, 96], D = [19], I12 = [35, 36], I10 = [68, 69], I12 = [74, 75], L2 = [−15~−14, −1~0, 31~32, 40~41, 83~84], |
| | L14 = [71~72], L7 = [62~63] |
| Struc1077 | M = [−44, −15, 6, 11, 23, 29, 68], W = [−43, −33, −31, −5, −3, 24, 27, 33, 34, 37, 42, 43, 55, 56, 64, 74, 92, 95, 98], D = [60], I1 = [57, 58], L2 = [−30~−29, −2~−1, 48~49], |
| | L3 = [16~18], L4 = [−9~−6], L5 = [75~79], L8 = [90~91] |
| Struc1078 | M = [−46, −39, −30, −18, 11, 38, 50, 56, 72, 84, 96], W = [−44, −9, 8, 42, 55, 64, 85], D = [−28, 78], I1 = [79, 80], L1 = [20~21], L2 = [−36~−35, −1~0, 32~33], L5 = [88~92] |
| Struc1079 | M = [−78, −65, −60, −38, −29, −24, −17, −5, 22, 44, 61, 73, 77], W = [−76, −75, −40, −39, 16, 24, 25, 59, 70], I1 = [−93, −92], I3 = [−83, −82], I1 = [51, 52], L1 = [56~58], |
| | L2 = [−53~−52, −1~0, 37~38], L5 = [−72~−68] |
| Struc1080 | M = [−78, −62, −43, −38, −35, −28, −21, 27, 35, 38, 40, 43], W = [−90, −56, −44, −40, −36, −15, −14], D = [−97], I2 = [−17, −16], L2 = [−70~−70], L3 = [−86~−85], |
| | L5 = [−54~−50], L7 = [−9~−7] |
| Struc1081 | M = [−32, 3, 17, 40, 57, 75, 92, 96], W = [−49, −33, 4, 6, 8, 9, 11, 52, 74, 77, 81], D = [43, 44, 83, 84, 85], I1 = [−10, −9], L2 = [−43~−42, −1~0, 60~61], L3 = [64~69], |
| | L4 = [48~50] |
| Struc1082 | M = [−91, −8, −83, −81, −73, −64, −34, −32, −23, −21, −14, 3, 57, 81, 83, 85], W = [−74, 9, 18, 21, 22, 24, 53, 64, 75, 86], D = [−67], I1 = [−43, −42], L1 = [31~32, 35~37], |
| | L2 = [−56~−56, −1~0] |
| Struc1083 | M = [−94, −58, −52, −46, −40, −35, 0], W = [−53, −47, −23, −7, −6], D = [−73, −72, −71, −66, −19, −18], I4 = [−61, −60], L2 = [−83~−80, −10~−9], L4 = [−33~−30] |
| Struc1084 | M = [−78, −73, −61, −45, −34, −1, 3, 27, 34, 36, 70], W = [−80, −75, −69, −60, −55, −47, −37, −36, −29, −21, −19, −15, −13, −3, −2, 1, 10, 26, 28, 29, 44, 61, 78, 81, 83, 85], |
| | D = [−65, −12, 38, 39, 40, 41, 42, 43], I1 = [−93, −92], I2 = [−41, −40], L2 = [−96~−95, −71~−70, 20~21], L11 = [−9~−9] |
| Struc1085 | M = [11, 20, 26, 29, 54, 89], W = [7, 16, 18, 43, 83], D = [5], L2 = [67~68], L3 = [−2~0, 73~75] |
| Struc1086 | M = [−39, −37, −9, −1, 7, 13, 18, 35, 59, 85], W = [−84, −62, −60, −52, −51, −44, −14, −8, −5, 20, 27, 43, 89, 91, 97], D = [−33, −3, 49], L1 = [95~96], |
| | L2 = [−77~−76, 45~46, 80~81] |
| Struc1087 | M = [−95, −87, −76, −56, −51, −46, 0, 22, 69, 88], W = [−90, −79, −78, −62, −47, −42, −41, −7, 4, 41, 45, 52, 53, 96], D = [−69, −68, −67, 10, 35, 98], I1 = [−78, −77], |
| | I1 = [12, 13], I4 = [38, 39], I1 = [99, 100], L2 = [−64~−63, 60~61, 73~74] |
| Struc1088 | M = [−76, −59, −42, −37, 13, 17, 35, 42, 74, 80, 85], W = [−84, −75, −60, −52, −51, −11, −4, −3, 4, 5, 43, 50, 91, 92], L2 = [46~47], L3 = [−82~−80, −33~−31, 51~52] |
| Struc1089 | M = [−93, −81, −74, −66, −43, −20, −14, −11, 0, 6, 12, 30, 52, 63, 92, 96], W = [−76, −53, −52, −40, 5, 27, 29, 44, 89, 94], D = [−57, −55, 35, 36], |
| | L2 = [−87~−86, −38~−38, −28~−28], L3 = [−50~−50, 20~22, 80~82] |
| Struc1090 | M = [−80, −74, −54, −52, −41, −15, −13, −11, −3, 0, 11, 19, 67, 69], W = [−81, −53, −50, −42, −39, 7, 26, 46, 47, 95], D = [82, 83, 84, 85, 66, 87], I2 = [95, 96], |
| | L2 = [27~28, 42~43], L3 = [−28~−27, 97~98] |
| Struc1091 | M = [−36, −26, −17, −10, −2, 0, 19, 21, 60, 65, 98], W = [−52, −23, −22, −19, 20, 45, 50, 51, 62, 85, 86, 87, 88], D = [31], I2 = [86, 87], I1 = [93, 94], |
| | L2 = [7~8, 24~25, 76~77], L3 = [−7~−5], L5 = [33~37] |
| Struc1092 | M = [−80, −78, −67, −43, −38, −28, −17, −14, −12, −7, −3, 0, 3, 6, 17, 45, 58, 61], W = [−98, −97, −90, −87, −77, −49, −39, 7, 43], D = [−61], I2 = [−93, −92], |
| | I4 = [−89, −88], I2 = [38, 39], L1 = [30~32], L2 = [−57~−56] |
| Struc1093 | M = [−97, −90, −75, −47, −44, −24, 0, 7, 12, 22, 43, 47, 91], W = [−98, −80, −63, −54, −50, −39, −11, 11, 19, 79, 96], D = [34, 35], I10 = [−30, −29], L1 = [−57~−55], |
| | L2 = [51~52], L3 = [−51~−51, 75~77], L4 = [27~30] |
| Struc1094 | M = [−93, −46, −18, −4, 2, 21, 46, 69, 90, 95], W = [−32, 7, 11, 27, 39, 40, 43, 47, 77, 97, 100], D = [78], I1 = [73, 74], L1 = [−85~−82], L2 = [−29~−28, 64~65], |
| | L3 = [34~38], L4 = [−91~−91, 55~58] |
| Struc1095 | M = [−14, 11, 14, 52], W = [−31, −8, −4, 29, 30, 38, 43, 65, 69, 83], D = [−30, −29, 8], I8 = [42, 43], L1 = [−21~−19], L2 = [87~88], L3 = [72~77], L5 = [66~68] |
| Struc1096 | M = [−40, −35, 0, 20, 25, 39, 42, 47, 49, 64], W = [−31, −30, −15, −8, 12, 23, 32, 41, 48, 52, 69, 76, 100], L2 = [−23~−22], L3 = [−7~−5, 82~84] |
| Struc1097 | M = [−92, −53, −48, −43, 0, 6, 12, 22, 79, 85], W = [−60, −56, −47, −26, −20, −9, 5, 20, 64, 68], D = [−81, −80, −79, −14, −13, −12], I3 = [−34, −33], L1 = [−29~−27], |
| | L3 = [−73~−71, −66~−64, −59~−57, 28~30], L4 = [−21~−21], L5 = [33~35] |
| Struc1098 | M = [−72, −61, −48, −39, −30, 6, 20, 52, 80, 87, 90, 95], W = [−99, −46, −45, −11, 25, 35, 46, 47, 66, 67, 69, 75, 91], D = [−23, −22], L5 = [38~42], L6 = [−58~−53] |
| Struc1099 | M = [−75, −64, −52, −11, 0, 12, 22, 40, 81], W = [−90, −77, −62, −53, −39, −38, −12, 5, 7, 46, 47, 51, 52, 59, 60], D = [34, 35], I2 = [−30, −29], L8 = [−96~−92], |
| | L2 = [−55~−54, 96~97], L3 = [86~88] |
| Struc1100 | M = [−69, −65, −61, −36, −9, 17, 52, 55, 60, 62, 65, 71], W = [−59, −40, −39, −38, −25, −2, 9, 14, 38, 44, 45, 48, 51, 53, 54, 67, 81], D = [28, 29, 30, 37, 69, 87, 88], |
| | I2 = [91, 92], L1 = [−31~−30], L2 = [−21~−20, 7~8, 33~34], L4 = [−56~−56, −48~−48], L5 = [−52~−62] |
| Struc1101 | M = [−97, −87, −75, −51, 0, 6, 12, 17, 22, 30, 42, 61, 68, 80, 95], W = [−99, −49, −48, −45, −25, −12, 5, 19, 45, 52, 90], D = [−53], I1 = [−55, −54], I1 = [−21, −20], |
| | L2 = [−34~−34, 91~92], L4 = [33~36] |
| Struc1102 | M = [−96, −52, −27, −17, −12, −3, 0, 12, 22, 27, 42, 71, 91], W = [−74, −62, −8, 7, 20, 25, 72], I3 = [−30, −29], L1 = [33~35, 47~48] |
| Struc1103 | M = [−86, −83, −48, −20, −5, 0, 11, 23, 26, 29, 49, 54, 59], W = [−88, −87, −85, −76, −52, −46, −4, 7, 8], D = [−14], I11 = [−26, −25], L2 = [−95~−95, −43~−42, 43~44], |
| | L6 = [−39~−35, −31~−31] |
| Struc1104 | M = [−94, −91, −85, −44, 0, 12, 45, 51], W = [−80, −51, −48, −40, −38, −12, 5, 20, 44, 60, 65, 75, 88, 94], D = [35, 36], I12 = [−38, −37], I2 = [−30, −29], I1 = [41, 42], |
| | L2 = [−70~−63, 22~23] |
| Struc1105 | M = [−94, −92, −66, −64, 6, 30, 48, 57, 59, 75], W = [−86, −78, −69, −68, −56, −42, −39, −37, −9, 35, 52, 91, 92, 95], |
| | D = [−54, −53, −52, −51, −50, −49, −48, −47, −46, −45, −44], L2 = [−80~−79, −36~−33, 37~38], L3 = [20~22] |
| Struc1106 | M = [−36, −26, −2, 0, 8, 25, 34, 37, 52, 60, 77, 95], W = [−58, −46, −37, −23, −19, −5, 1, 3, 20, 41, 42, 62, 76, 81, 99], D = [−10, −9], I2 = [−5, −4], I1 = [93, 94], |
| | L2 = [27~29, 83~84], L3 = [−31~−29] |
| Struc1107 | M = [−96, −88, −74, −71, −54, −52, −11, 0, 12, 22, 54, 89], W = [−97, −86, −62, −53, −51, −45, −43, −38, −24, −18, 5, 8, 9, 81, 91], D = [38, 45], I2 = [−30, −29], |
| | I1 = [48, 49], L1 = [32~35] |
| Struc1108 | M = [−36, −22, −15, 0, 7, 19, 24, 77, 85, 95], W = [−71, −70, −69, −65, −39, −38, −31, −30, −23, 22, 25, 47, 83], D = [32, 33, 34, 35, 42, 43, 44, 51, 52, 62, 63, 74], |
| | L2 = [−68~−67, 39~40], L5 = [−11~−10] |
| Struc1109 | M = [12, 30, 51, 70], W = [−21, −20, 2, 15, 19, 25, 42, 43, 46, 71, 75, 79, 80], D = [34, 35], L8 = [−12~−9] |
| Struc1110 | M = [−63, −26, −12, −1, 6, 27, 29, 41, 50, 77], W = [−94, −89, −88, −65, −55, −49, −39, −30, −27, −6, 19, 20, 49, 83, 90], D = [−21, −20, −19], I4 = [−32, −31], |
| | I2 = [32, 33], L2 = [87~88], L3 = [−53~−51, −5~−3], L6 = [58~63] |
| Struc1111 | M = [−96, −76, −62, −40, −20, 2, 29, 93], W = [−95, −63, −51, −21, 20, 48, 52], I1 = [−90, −89], L3 = [−54, −53], L1 = [11~12], L2 = [−47~−43, −3~−2, 43~44, 79~80], |
| | L3 = [−35~−34] |
| Struc1112 | M = [−80, −29, −14, 2, 15, 21, 38, 46, 65, 90, 95], W = [−51, −45, −34, −16, 7, 11, 39, 97], D = [−94, −91, −87, 33, 34, 35], I1 = [−82, −81], I1 = [−77, −76], |
| | I1 = [−75, −74], I1 = [73, 74], L1 = [77~78], L2 = [−42~−41, −4~−3], L3 = [54~56] |
| Struc1113 | M = [−97, −76, −56, −51, 0, 6, 12, 32, 38, 62, 70], W = [−53, 31, 41, 49, 57, 68, 83], D = [−43, −42, 79], I1 = [−21, −20], I2 = [34, 35], I11 = [54, 55], L2 = [−92~−91], |
| | L3 = [−39~−39, 20~22], L4 = [−35~−34, 73~74] |
| Struc1114 | M = [−97, −75, −44, −39, −19, 0, 8, 12, 43, 75], W = [−84, −83, −69, −30, −15, −4, 5, 29, 42, 51, 80, 89, 91], D = [34, 35], L2 = [−34~−34, −12~−11], L3 = [20~22], |
| | L4 = [−55~−52] |
| Struc1115 | M = [−98, −95, −75, −72, −64, −48, −40, −24, −5, 0, 4, 16, 26, 38, 44, 50], W = [−99, −34, −25, −22, −13, 6, 8, 57, 61, 63], I1 = [−79, −78], L2 = [31~32], L3 = [−32~−30], |
| | L5 = [54~56], L7 = [−85~−81] |
| Struc1116 | M = [−89, −66, −33, −27, −5, 0, 8, 23, 52, 59, 65, 80, 90, 93], W = [−98, −86, −85, −83, −77, −61, −60, −51, −50, −39, −26, −20, −14, −13, −10, −3, 45, 12, 73, 75, |
| | 79, 89, 94], D = [−48], I3 = [81, 82], L2 = [−22~−21, 49~50, 84~86, 97~98], L3 = [−80~−78, 34~35, 42~43] |
| Struc1117 | M = [9, 60], W = [22, 28, 61, 71, 88, 94], D = [45], I1 = [43, 44], L1 = [48~49], L3 = [0~2, 34~36, 91~93] |
| Struc1118 | M = [−14, −10, −6, 31, 44, 52, 62], W = [−12, −3, 13, 16, 30, 37, 47, 55, 59, 60, 63, 80, 81, 83, 84], I5 = [−41, −40], I1 = [−20, −19], L8 = [70~71], |
| | L2 = [6~8, 19~20, 28~29], L6 = [−28~−26] |
| Struc1119 | M = [−75, −70, −39, −35, −17, −4, 26, 87], W = [−79, −59, −54, −12, 7, 19, 20, 42, 43, 46, 78], D = [−47, −46, −45, −44, −10], L2 = [−58~−57], L3 = [−64~−62], L5 = [47~51] |
| Struc1120 | M = [−21, −18, 0, 6, 12, 19, 22, 30, 43, 55, 74, 96], W = [−12, 5, 27, 51, 75, 79], L2 = [92~93], L3 = [33~37] |
| Struc1121 | M = [−96, −75, −63, −52, −40, −27, −14, −3, 27, 71, 81, 91], W = [−93, −62, −53, −50, −38, 15, 25, 35, 36, 72], I5 = [−30, −29], L1 = [47~48], L2 = [−55~−54, 18~19] |
| Struc1122 | M = [−76, −74, −59, −3, 6, 26, 36, 66, 76, 78], W = [−94, −75, −63, −52, 20, 35, 37, 38, 45, 80, 92], I1 = [−35, −34], L2 = [−20~−20, 42~43, 50~51], L3 = [−14~−12, 29~31], |
| | L4 = [−56~−53, −44~−41] |
| Struc1123 | M = [−47, −42, −32, −27, −22, −12, 0], W = [−98, −70, −64, −63, −31, −17], D = [−60, −59, −58, −57], L1 = [−20~−20], L2 = [−92~−91], L3 = [−74~−72], L5 = [−52~−50] |
| Struc1124 | M = [−95, −71, −10, −6, −1, 19, 29, 40, 54, 89], W = [−97, −96, −93, −86, −62, −56, −45, −7, 3, 6, 9, 15, 24, 35, 37, 39, 49, 81, 91, 94, 98], D = [−21, −20, −17, −16], |
| | I9 = [−30, −29], L2 = [−88~−87, 7~8, 45~46, 76~77], L3 = [−3~−3, 31~34] |
| Struc1125 | M = [−75, −72, −64, −62, −48, −18, 16, 32, 37, 39, 42], W = [−99, −90, −50, −49, −44, −34, 12, 50, 57, 61, 63], D = [−84, −83, −82, −81], I1 = [−90, −89], |
| | L2 = [−41~−40, −31~−30, −24~−23], L3 = [−7~−5], L4 = [−95~−95] |
| Struc1126 | M = [−80, −62, −43, −40, −37, −20, −1, 2, 6, 27, 30, 40, 44], W = [−95, −89, −88, −75, −73, −68, −67, −63, −58, −51, −28, −21, −11, −6, 20, 21, 36, 38, 39, 48, 65, 66, 69, |
| | 71, 80, 81, 83], D = [78, 79], I1 = [−90, −89], I6 = [−27, −26], L1 = [11~12], L2 = [−94~−93], L3 = [−54~−52] |
| Struc1127 | M = [−97, −76, −56, −39, 0, 12, 42, 56, 63, 70, 80], W = [−95, −63, −19, −12, −11, 5, 15, 41, 46, 97], D = [−48, 34, 35], L2 = [−31~−31, −7~−6, 91~92], L3 = [−52~−51, 20~22] |
| Struc1128 | M = [−88, −74, −70, −44, −20, −1, 6, 10, 13, 19, 23, 32, 43, 49, 75, 85, 92], W = [−94, −90, −89, −87, −76, −75, −73, −54, −40, −39, −12, −11, −10, −6, 52, 70, 89, 90], |
| | D = [−48], I1 = [−51, −50], L2 = [−56~−55, 29~30, 79~80, 95~96], L3 = [−29~−28, 36~38] |
| Struc1129 | M = [−86, −76, −66, −61, −53, 29, 47, 90, 92], W = [−63, −44, −40, −37, 2, 33, 42, 19, 96], L1 = [34~36], L2 = [94~95], L3 = [−26~−22] |
| Struc1130 | M = [−32, −26, −19, −1, 19, 34, 36, 42, 48, 55, 65], W = [−94, −77, −76, −68, −58, −49, −42, −4, −3, 16, 36, 39, 41, 47, 68, 69, 79, 89], D = [−97, −96, −51], I1 = [−91, −90], |
| | I1 = [−55, −54], I11 = [−37, −36], I2 = [−17, −16], I4 = [85, 86], L2 = [−47~−45, −41~−39, 51~52, 90~91], L3 = [7~9], L7 = [−63~−59, −12~−11] |
| Struc1131 | M = [−98, −95, −74, −66, −61, −1, 6, 61, 74, 94], W = [−97, −94, −89, −88, −63, −44, −43, −40, −37, −28, −26, −12, −11, −6, 20, 27, 28, 33, 37, 38, 42, 43, 79, 80], |
| | D = [−20], L2 = [−84~−83, −39~−38, −27~−27, −4~−3, 29~30, 51~52], L3 = [46~48], L4 = [89~92], L6 = [−56~−51] |
| Struc1132 | M = [−30, −26, −22, 23, 89], W = [−39, −35, −34, −6, 24, 25, 39, 54, 56, 57, 91], D = [29, 30, 31, 32, 33, 34, 35], I13 = [−34, −33], I1 = [72, 73], I9 = [73, 74], |
| | L2 = [−1~0, 78~79], L3 = [48~50] |
| Struc1133 | M = [−75, −70, −62, −35, −10, 4, 27, 61, 68, 87, 90], W = [−67, −43, −36, −12, −4, −3, 7, 19, 20, 42, 43, 52, 96], D = [−57, −56, −55], L2 = [−40~−39, −31~−30], |
| | L4 = [−48~−44] |
| Struc1134 | M = [34, 45, 76, 85], W = [5, 11, 12, 22, 28, 39, 56, 74, 84, 86], I1 = [3, 4], L2 = [−1~1], L3 = [48~51], L6 = [91~99] |
| Struc1135 | M = [−96, −79, −27, −3, 0, 12, 22, 27, 42, 71, 74, 81], W = [−71, −62, 5, 7, 25, 53, 72, 93, 96], D = [−90, −89, −88, −55, −54, 35, 36], I2 = [−51, −50], I2 = [−30, −29], |
| | L1 = [47~48], L2 = [90~91] |
| Struc1136 | M = [−97, −74, −62, −38, −34, −16, −12, −8, 22, 44], W = [−42, −26, −9, 8, 47, 51, 52, 53, 74, 75, 77, 79, 90], I7 = [−79, −78], I1 = [−21, −20], I1 = [97, 98], |
| | L1 = [34~36, 91~92], L2 = [−51~−50, 13~14], L3 = [4~6] |
| Struc1137 | M = [−74, −54, −52, −45, −11, −3, 43, 61, 69, 75], W = [−62, −53, −39, 5, 7, 46, 95], D = [22, 23, 82, 83, 84, 85, 86, 87], L1 = [33~35, 98~99], L2 = [−1~0, 11~12, 51~52], |
| | L3 = [27~28], L6 = [−28~−26] |
| Struc1138 | M = [−92, −87, −66, −43, −20, −1, 5, 19, 47, 83, 92, 54], W = [−97, −94, −75, −44, −40, −37, −36, −26, −10, −6, 33, 84], D = [−71], I1 = [−74, −73], |
| | L2 = [−62~−61, 29~30, 85~87], L4 = [−55~−52], L5 = [−35~−33] |
| Struc1139 | M = [−46, −20, −12, −1, 4, 6, 47, 51, 80, 91], W = [−92, −89, −88, −72, −63, −62, −57, −56, −43, −32, −18, −6, 31, 50, 62, 74, 88, 90], L1 = [40~41], |
| | L2 = [−75~−74, −70~−69, 29~30, 34~35], L4 = [−29~−27, 36~37] |
| Struc1140 | M = [−75, −50, −44, −25, −1, 4, 6, 37, 47, 8, 89], W = [−98, −63, −53 −51, −12, 12, 42, 43, 51, 52, 60, 72, 79], I1 = [44, 45], I1 = [62, 63], L1 = [33~35], |
| | L2 = [−61~−60, −55~−54, −40~−39, 95~96], L3 = [66~68] |
| Struc1141 | M = [−75, −68, −45, −33, −30, 0, 21], W = [−98, −87, −83, −58, −47, −40, −24, −7, −6, 45, 50, 56], D = [28, 36], I1 = [32, 33], I1 = [47, 48], L1 = [53~55, 58~60], |
| | L2 = [−95~−94, −63~−62, 40~41] |
| Struc1142 | M = [−90, −68, −18, −1, 25, 38, 44, 46, 73], W = [−67, −57, −55, −52, −51, −45, −40, 11, 19, 31], I1 = [−29, −28], L1 = [33~35], L2 = [−98~−97], L3 = [−44~−42], |
| | L4 = [−78~−75] |
| Struc1143 | M = [−19, −13, 16, 24, 63, 70, 73, 83, 85], W = [26, 35, 42, 45, 50, 51, 87, 95, 96], L2 = [6~7, 91~92], L3 = [31~33] |
| Struc1144 | M = [−66, −53, −48, −26, −19, 6, 20, 30, 74, 81], W = [−79, −58, −56, −47, −21, −8, 1, 36, 52, 64, 68], D = [−33, −32, −29], I3 = [−63, −62], I7 = [35, 36], I4 = [39, 40], |
| | L2 = [−72~−71, −61~−60, −44~−43, −15~−13, 84~85], L3 = [−95~−92] |
| Struc1145 | M = [−93, −87, −73, 0, 12, 48, 51, 80], W = [−88, −76, −69, −56, −12, 5, 46, 91, 92, 95], D = [−43, −42, −38, −37, −36, −35, −34, −33, 34, 35], L2 = [−80~−79, 30~31] |
| Struc1146 | M = [−89, −68, −57, −45, −39, −16, −5, −1, 24, 46, 64, 80, 85], W = [−91, −65, −62, −51, −46, −42, −41, 26, 47, 48, 56, 69, 92, 93, 95], D = [−35, −34, 34, 35, 36], |
| | L4 = [−80~−77] |
| Struc1147 | M = [−77, −61, −57, −55, −50, −45, −41, −22, 0, 12, 22, 37, 46, 82], W = [−89, −86, −71, −56, −54, −46, 5, 47, 51, 52, 79, 85, 91, 95, 98], D = [−35, 29, 32], L2 = [34~35] |
| Struc1148 | M = [−75, −55, −53, −47, −19, −11, 12, 26], W = [−84, −83, −69, −27, −15, −4, 5, 29, 42, 91, 92], I2 = [−30, −29], L1 = [33~35], L2 = [−1~0], L3 = [20~22] |
| Struc1149 | M = [−90, −77, −68, −56, −38, −5, 9], W = [−91, −82, −36, −15, −13, 8], D = [−83], I1 = [−35, −34], L2 = [−66~−65, −1~0] |
| Struc1150 | M = [−91, −61, −59, 74, 87], W = [−80, −64, −63, −55, −54, −50, −24, −11, 21, 40, 41, 73, 75, 76, 82, 99], D = [−46, −45, −27, 95], I1 = [12, 13], I1 = [22, 23], |
| | L8 = [30~37], L2 = [−68~−67, −32~−31, −23~−23, −1~0, 27~28, 83~84], L3 = [−77~−75] |
| Struc1151 | M = [−62, −38, −28, −25, −3, −1, 3, 6, 23, 32], W = [−92, −90, −76, −12, −11, 38, 43], D = [−96, −95, −94, −93, −87, −16, 46], I1 = [−83, −82], I1 = [−75, −74], |
| | I1 = [−73, −72], I1 = [−19, −18], I8 = [55, 56], L2 = [−70~−69, −44~−43], L5 = [−80~−78] |
| Struc1152 | M = [−88, −58, −27, −13, −5, 0, 5, 15], W = [−89, −78, −63, −34, −29, −28, −10, −6, 9, 10, 12], D = [−96, −95, −94], I14 = [−49, −48], L2 = [−68~−67], L3 = [−77~−75], |
| | L6 = [−44~−41] |
| Struc1153 | M = [−21, −9, −3, 0, 12, 22, 43, 61, 89], W = [−42, −41, −4, 5, 46, 79, 80, 91, 95, 97], D = [−12], I1 = [95, 97], L1 = [30~32], L2 = [34~35] |
| Struc1154 | M = [−91, −77, −67, −40, −33, −17, 10, 12, 19, 22, 30, 53, 81], W = [−97, −75, −63, −56, −54, −4, −3, 5, 97], I10 = [93, 94], L1 = [34~36, 89~90], |
| | L2 = [−28~−28, 45~47, 85~86], L3 = [41~43] |
| Struc1155 | M = [−93, −82, −73, −50], W = [−91, −89, −58, −45, −28, −10, 4], I2 = [−28, −27], L1 = [9~11], L2 = [−61~−60, −1~0], L3 = [−38~−33] |
| Struc1156 | M = [−83, −70, −57, −51, −36, −34, −22, −3, −1, 9, 20, 30, 47], W = [−91, −90, −82, −59, −35, −28, −10, 5, 6, 17, 29, 37, 38, 66], D = [−78, −77, 27, 54, 55, 56, 57, 58, 59], |
| | L2 = [−61~−60, −18~−17, 31~32, 61~62] |
| Struc1157 | M = [−88, −79, −16, 0, 4, 57, 59, 87, 94, 96], W = [−82, −58, −47, −46, −41, −4, 13, 39, 79], |
| | D = [−76, −75, −74, −73, −72, −71, −70, −69, −68, 67, −66, −65, −64, −63, −62, −53, −38, −37, −36, −35, −34, −33, −32, −31, −30, −29, 22], I1 = [−45, −44], |
| | I2 = [−42, −41], I2 = [28, 29], L2 = [−57~−56, 33~34, 40~41], L3 = [−97~−95] |
| Struc1158 | M = [−98, −76, −13, −11, 0, 22, 37, 46, 48, 77, 91], W = [−78, −64, −63, −41, −40, −39, −28, −19, 5, 17, 19, 79], D = [−46, −45, −44, 33, 34], I1 = [−54, −53], |
| | I3 = [−30, −29], L2 = [−57~−56, 12~13, 42~43] |
| Struc1159 | M = [−19, −13, 7, 11, 16, 62, 66, 73, 76], W = [−8, 1, 26, 40, 64, 87, 95, 96], D = [32, 35, 36, 37, 38, 39, 42], L2 = [−1~0, 81~82, 85~86] |
| Struc1160 | M = [−78, −68, −60, −55, −50, −38, −33, −10], W = [−92, −91, −84, −62, −56, −39, −37, −29, −28, −19, −5, 9, 11, 12, 15, 16], D = [−95], I1 = [−94, −93], L2 = [−75~−74], |
| | L4 = [−45~−42] |
| Struc1161 | M = [−97, −85, −76, −74, −52, −44, 3, 7, 12, 17, 22, 28, 52, 66], W = [−77, −64, −41, −40, −10, −4, −3, 5, 59, 79, 95], D = [−29, 31, 35, 36], I1 = [−81, −80], I1 = [47, 48], |
| | L2 = [−57~−56, −1~0, 42~44], L3 = [90~92] |
| Struc1162 | M = [−98, −95, 12, 22, 43, 68, 80, 92], W = [−94, −88, −74, −61, −54, −53, −47, −44, −12, 5, 19, 20, 35, 42, 76, 96], D = [−6, 33, 34], I2 = [−30, −29], I11 = [−25, −24], |
| | L2 = [−10~−10, −1~0], L3 = [−21~−39], L4 = [−51~−50], L6 = [48~53] |
| Struc1163 | M = [−97, −43, −25, −21, 25, 27, 49], W = [−91, −64, −63, −35, −9, −4, 15, 52, 94, 95, 100], I1 = [12, 13], I1 = [78, 79], I1 = [81, 82], L1 = [84~85], L2 = [−47~−46, −1~0], |
| | L3 = [−89~−87, −32~−30, 39~41], L4 = [30~33] |
| Struc1164 | M = [−91, −37, −27, −19, 9], W = [−89, −83, −60, −50, −41, −29], D = [−52, −48], I3 = [−74, −73], L2 = [−87~−86, −81~−77, −34~−33, −1~0], L3 = [−58~−56], |
| | L4 = [−68~−65, −45~−42] |
| Struc1165 | M = [−82, −52, −30, −6, −4, 52, 93, 96], W = [−96, −67, −58, −32, −10, 11, 12, 31, 34, 66, 67, 72, 73, 82, 86, 95], D = [35, 36, 37], L2 = [−91~−90, −64~−63, −1~0, 56~57], |
| | L3 = [−16~−14] |
| Struc1166 | M = [−93, −51, −21, −14], W = [−82, −33, −31, −29, −28, 11, 13, 16], D = [−65, −35, −34], I3 = [−88, −87], I1 = [−64, −63], I2 = [−41, −40], I2 = [8, 9], I4 = [11, 12], |
| | L2 = [−1~0] |
| Struc1167 | M = [−97, 20, 36, 43, 48, 83], W = [−88, −69, −56, −53, −52, 1, 2, 27, 28, 52, 91], D = [−43, −42, −41, −40, −39, −38, −37, −36, −35, −34, −33, −32, −31, −30, 90], |
| | I1 = [97, 98], L2 = [−80~−79, −58~−57, 79~80], L3 = [−66~−64] |
| Struc1168 | M = [−73, −60, −28, 17], W = [−58, −45], D = [−37], I5 = [−88, −87], L2 = [9~12], L3 = [−35~−33] |
| Struc1169 | M = [−96, −74, −60, −50, −43, −16, −8, 0, 4, 20, 22, 42, 48, 57, 92, 95], W = [−55, −19, 5, 8, 10, 51, 52, 56, 14, 75], I1 = [−28, −27], I1 = [−21, −20], L1 = [34~36], |
| | L3 = [12~14] |
| Struc1170 | M = [−44, −18, −13, 0, 13, 33, 54], W = [−87, −69, −59, −49, −41, −40, −15, −7, 23, 35, 36], D = [−62], I2 = [28, 29], L2 = [−31~−30, −6~−5], |
| | L3 = [−48~−47, −25~−23, 23~24], L5 = [−86~−82, 40~43] |
| Struc1171 | M = [−97, −94, −66, −39, −20, −7, 0, 10, 12, 17, 22, 30, 67, 80], W = [−98, −63, −52, −51, −43, −13, −12, 29, 42, 43, 44, 52, 61, 78, 92], I2 = [−52, −51], I1 = [−29, −28], |
| | L1 = [−56~−55], L2 = [−89~−88, 5~6, 34~37], L3 = [89~91] |
| Struc1172 | M = [−80, −75, −67, −58, −48, −45, −27, −13, −5, 0, 5], W = [−29, −28, −6, 2, 9, 10, 16], I2 = [−38, −37], I14 = [−34, −33] |
| Struc1173 | M = [−96, −82, −52, −19, 0, 6, 52], W = [−85, −74, −31, −14, −6, 1, 5, 34, 50], D = [−25], I1 = [−60, −59], I15 = [−42, −41], I1 = [27, 28], L2 = [−93~−92, 23~24, 31~32], |
| | L6 = [−37~−34] |
| Struc1174 | M = [−78, −60, −57, −38, −29, −7, 4], W = [−33, −16, 12], D = [−48, −47], L2 = [−1~0], L3 = [−84~−82], L4 = [−94~−91] |
| Struc1175 | M = [−69, −57, −38, −34, −26, −14, 5, 9, 12], W = [−81, −60, −48, −41, −28, −9, −5, 15], D = [−65], I1 = [−94, −93], I1 = [−64, −63], I1 = [−53, −52], L9 = [−90~−83], |
| | L2 = [−1~0], L3 = [−80~−78], L4 = [−47~−43] |
| Struc1176 | M = [−81, −74, −70, −67, −61, −57, −48, −37, −31, −5, 5, 12], W = [−92, −91, −90, −86, −28, −10, 9, 10], L2 = [−51~−50, −1~0, 15~16], L3 = [−44~−42] |
| Struc1177 | M = [−16, −11, −9, 12, 22, 48, 51, 70], W = [−24, −20, 5, 25, 46, 52, 71, 75, 79, 80, 95], D = [35, 36], L2 = [−1~0, 89~90] |
| Struc1178 | M = [−17, −13, 0, 7, 16, 73, 75, 79, 89, 91], W = [−16, −5, 1, 84, 95], L2 = [25~26, 85~86], L4 = [30~33] |
| Struc1179 | M = [−85, 7, 68], W = [−94, −74, −73, −54, −52, −47, −44, −32, −27, 1, 2, 15, 19, 33, 36, 42, 76, 96, 97], D = [−43, −6], I1 = [−32, −31], |
| | L2 = [−96~−95, −39~−39, −10~−10, 34~35, 46~47, 79~80, 91~93], L3 = [−90~−88], L4 = [−51~−50, 50~53] |
| Struc1180 | M = [−94, −70, −51, −34, −29, −21, −5, 4, 1], W = [−90, −86, −69, −61, −45, −43, −42, −11, 16], D = [−84, −83], I1 = [−73, −72], L2 = [−75~−75, −37~−37, −1~0] |
| Struc1181 | M = [−87, −53, −47, 6, 17, 25, 42, 66, 73], W = [−94, −88, −63, −55, −45, −32, −12, −11, 1, 2, 19, 20, 35, 37], I1 = [29, 30], I2 = [31, 32], |
| | L2 = [−98~−97, −90~−89, −68~−67, 46~47, 51~52], L4 = [−20~−18] |
| Struc1182 | M = [−95, −85, −81, −72, −62, −48, −44, −41, −30, 21], W = [−98, −87, −24, −23, −7, 1, 34, 45], D = [28, 50, 51, 52], I1 = [39, 40], L2 = [−1~0, 35~36], L3 = [59~61], |
| | L4 = [63~65], L6 = [40~41] |
| Struc1183 | M = [−97, −76, −54, −51, −39, 12, 52, 56, 63, 80], W = [−98, −94, −75, −63, −56, −55, −12, 5, 41, 46, 47, 75, 96], D = [35, 36], L2 = [−31~−31, −7~−6, −1~0], |
| | L3 = [20~22, 70~72, 90~92] |
| Struc1184 | M = [−94, −91, −68, −58, −28, 0, 4], W = [−75, −67, −61, 9, 15], D = [−84, −83, −82, −45, −44], L4 = [−78~−78] |
| Struc1185 | M = [−40, −7, 20, 25, 42, 47, 49, 55, 64, 79], W = [−71, −61, −59, −31, −15, −13, 2, 12, 15, 16, 23, 41, 48, 52, 72, 95], D = [−53], I1 = [−26, −25], L2 = [−23~−22, −1~0], |
| | L3 = [−67~−63, −35~−33], L6 = [82~87] |
| Struc1186 | M = [−86, −55, −41, −14, 0, 12, 22, 50, 95], W = [−63, −52, −21, −3, 5, 10], D = [−77], I1 = [−29, −28], L1 = [34~36, 46~47], L2 = [−45~−44, 78~79], L3 = [41~43] |
| Struc1187 | M = [−30, 0, 37, 42, 49, 66, 68, 76, 84, 93, 99], W = [−52, −12, −5, 1, 13, 24, 33, 53, 63, 64, 96, 100], L2 = [−45~−44, 10~11, 87~88], L3 = [29~31], L5 = [−40~−35] |
| Struc1188 | M = [−44, −21, 0, 39, 59, 67], W = [−55, −39, −31, −23, −5, 1, 6, 8, 24, 25, 83, 84, 85, 86], D = [−38, −37], L2 = [48~49, 76~77], L3 = [−12~−10, 31~33, 90~92] |
| Struc1189 | M = [−72, −67, −64, 38, −35, −32, 7, 48, 68], W = [−94, −52, −41, −40, −21, −20, −4, 1, 2, 15, 46, 50, 94, 95], D = [−47, −46, −45, −25, −11], I2 = [−59, −58], |
| | I1 = [−53, −52], L1 = [34~36], L2 = [−77~−76, −9~−9, 19~20, 84~85], L3 = [41~43, 88~90] |
| Struc1190 | M = [−54, −30, 0, 7, 36, 52, 66, 71], W = [−71, −68, −56, −52, −48, −40, 14, 44, 45, 51], D = [69], I9 = [−68, −67], I11 = [−63, −62], I6 = [−47, −46], I1 = [−26, −25], |
| | L1 = [25~28], L2 = [−21~−20], L6 = [86~91] |
| Struc1191 | M = [−95, −92, −76, −64, −62, −51, −13, 9, 14], W = [−55, −35, −9, −8], I3 = [−35, −34], I2 = [−32, −31], L2 = [−59~−58, −43~−42, −1~0], L3 = [−17~−15] |
| Struc1192 | M = [−41, −12, −1, 17, 39, 81, 86, 97], W = [−58, −34, −33, −26, 4, 13, 37, 73, 90, 91, 93], D = [−51, −50], I2 = [−40, −39], L2 = [27~28], L3 = [34~36] |
| Struc1193 | M = [−87, −80, −73, −52, −12, 0, 22, 59, 65, 84], W = [−95, −91, −67, −50, −44, 5, 47, 52, 60, 66, 90], D = [−28, −27, −26, −18, 35, 36], L2 = [−36~−36], L4 = [12~15], |
| | L5 = [−59~−55] |
| Struc1194 | M = [−94, −89, −64, −41, 15, 33, 37, 41, 50], W = [−86, −51, −42, −7, −6, 2, 34, 45], D = [21, 23, 24], L2 = [−98~−97, 61~62], L3 = [−1~1, 55~57] |
| Struc1195 | M = [−96, −71, −45, −1, 11, 20, 37, 21, 49, 73, 79], W = [−99, −89, −67, −61, −58, −46, −38, −35, −34, 14, 26, 35, 36, 78], I10 = [−17, −16], I1 = [7, 8], |
| | L2 = [−93~−92, −49~−48, −12~−11, 3~5, 32~33], L3 = [−23~−23, 28~29, 92~94], L4 = [87~90] |
| Struc1196 | M = [−97, −89, −76, −52, −49, −9, 6, 30, 56, 60, 87, 90, 95], W = [−99, −96, −94, −75, −69, −67, −65, −59, −32, −26, −11, −6, 25, 35, 36, 66, 70, 75], |
| | D = [−3], I7 = [−94, −93], I15 = [−65, −64], I4 = [−58, −57], I1 = [−56, −55], I8 = [−43, −42], I15 = [−36, −37], I13 = [−37, −36], |
| | I12 = [−26, −25], I1 = [−1, 0], L1 = [−61~−60], L2 = [−71~−70, 19~20, 79~80], L3 = [−84~−84], L4 = [−79~−79], L6 = [38~43], L13 = [−45~−45], L15 = [−20~−20] |
| Struc1197 | M = [−76, −35, −31, −20, −7], W = [−87, −86, −84, −73, −54, −48, −44, −17, −8, 2, 5, 6, 15], D = [−65, 7], I1 = [−93, −92], I14 = [−89, −88], I13 = [−87, −86], |
| | I12 = [−84, −83], I1 = [−62, −61], L1 = [−16~−14], L2 = [0~1, 19~20] |
| Struc1198 | M = [−88, −84, −70, −46, −44, −25, −17, 7, 17, 84, 88], W = [−96, −83, −82, −62, −58, −56, −37, −30, −24, 36, 45, 75], D = [−34], I2 = [28, 29], L2 = [51~52], L3 = [0~2] |
| Struc1199 | M = [−33, −20, −17, −4, 6, 11, 25, 59, 63, 72], W = [−88, −81, −74, −57, −47, −46, −31, −30, −26, 7, 9, 17, 18, 24, 34, 44, 52, 70], D = [45, 46], I1 = [−72, −71], |
| | I2 = [41, 42], L2 = [−25~−24], L3 = [0~2], L7 = [−80~−79] |
| Struc1200 | M = [1, 30, 43, 52, 59, 67, 79], W = [−10, −2, 4, 24, 31, 74], D = [18, 19, 20, 21, 22, 23, 92, 93], I14 = [98, 99], L2 = [35~36], L3 = [83~85] |
| Struc1201 | M = [−93, −80, −63, −61, −41, 25, 41, 43, 74, 77, 82], W = [−96, −92, −91, −89, −77, −73, −64, −47, −28, −12, −5, −4, 6, 23, 38], D = [66, 67], L2 = [−21~−20, −9~−8, 57~58], |
| | L3 = [0~1], L4 = [50~53], L7 = [29~33] |
| Struc1202 | M = [−82, −70, −60, −45, −36, 0], W = [−77, −35, −31, −30, −3, 3, 9, 13, 16], D = [−53, −50], L2 = [−48~−47] |
| Struc1203 | M = [14, 18, 30, 44, 47, 67, 93], W = [−17, −16, −1, −3, 3, 5, 8, 9, 26, 31, 36, 53, 54, 79, 84, 85], I2 = [−3, −2], L2 = [−21~−20, 21~22, 34~35, 74~75] |
| Struc1204 | M = [0, 39, 45], W = [10, 44, 46, 86], D = [18], L2 = [21~22], L3 = [74~76] |
| Struc1205 | M = [−89, −73, −52, −49, −44, 0, 42, 53], W = [−94, −93, −46, −33, −9, 11, 28, 37], L2 = [−92~−91, −81~−80, −6~−3, 8~9], L3 = [−26~−24, −18~−16], L13 = [−66~−64] |
| Struc1206 | M = [4, 21, 49, 52, 65, 71, 85, 91, 94], W = [−1, 30, 31, 34, 48, 66, 74, 81], L2 = [−11~−10, 26~27, 40~41], L3 = [57~59], L5 = [34~37], L7 = [−18~−17] |
| Struc1207 | M = [6, 22, 44, 47, 67, 71, 93], W = [−17, −11, −3, 3, 5, 8, 9, 36, 38, 53, 61, 79, 84, 85, 94, 99], I2 = [−3, −2], L2 = [−21~−20, 74~75], L3 = [−15~−13], L5 = [30~34] |
| Struc1208 | M = [−98, −49, −37, 22, 43, 82], W = [−85, −76, −62, −61, −24, −40, −33, −32, −1, 9, 24, 92], I7 = [−42, −41], L1 = [31~36], L3 = [−94~−92], L4 = [74~77] |
| Struc1209 | M = [−83, −81, −64, −47, −36, −13, −8, 0, 18, 21, 27, 34], W = [−87, −84, −72, −60, −27, −19, 5, 42, 82], D = [−96, −95, −94, −93, −26, −25, −24, −23, −22, −21, −20], |
| | I6 = [65, 66], L1 = [50~55], L2 = [−75~−74, 12~13], L3 = [76~78] |
| Struc1210 | M = [−18, 20, 27, 33, 64], W = [−22, −16, −9, −2, 22, 26, 28, 51, 82, 88], I2 = [37, 38], L2 = [−7~−6] |
| Struc1211 | M = [0, 87, 92], W = [−21, −20, 4, 13, 16, 21, 33, 44, 56, 59, 61, 65, 99], I1 = [−7, −6], I1 = [14, 15], I1 = [15, 16], L1 = [41~42], L2 = [77~78], L3 = [65~68], |
| | L4 = [48~51] |
| Struc1212 | M = [−44, −17, −12, −7, −3, 0, 16, 21, 38, 44, 51], W = [−26, 39, 43, 45, 47, 62, 63], D = [−41], I2 = [−38, −37], L3 = [31~33] |
| Struc1213 | M = [7, 18, 28, 30, 61, 67], W = [−15, −2, 9, 10, 26, 32, 59, 79, 85], L8 = [−18~−16], L1 = [54~55, 93~94], L2 = [21~22, 43~44], L4 = [73~16] |
| Struc1214 | M = [−40 −21, −17, 8, 34, 53, 89], W = [−41, −27, −14, 4, 5, 9, 42, 54, 58, 60, 86, 100], D = [46, 92, 96], I1 = [93, 94], L9 = [71~72], |
| | L2 = [−34~−33, −29~−28, −1~0, 21~22, 63~64], L3 = [79~85] |
| Struc1215 | M = [−92, −83, −76, −8, 40, 82], W = [−78, −75, −71, −61, −58, −50, −47, −46, −6, −5, 7, 15, 17, 71, 79, 84, 86], I1 = [−59, −58], I2 = [−10, −9], I2 = [28, 29], |
| | L2 = [−97~−96, 72~73], L3 = [0~2] |
| Struc1216 | M = [−21, 3, 8, 25, 54], W = [−83, −75, −52, −51, −20, −3, 11, 13, 34, 35, 39, 43, 44, 66], D = [−49], I1 = [−45, −44], I1 = [−32, −31], I3 = [60, 61], L1 = [−71~−69], |
| | L2 = [−88~−87], L3 = [−74~−74, −2~0] |
| Struc1217 | M = [20, 23, 35, 60, 7, 91, 95], W = [22, 31, 49, 57, 74, 84, 96], I10 = [39, 40], I8 = [40, 4], L1 = [−1~1], L2 = [53~54], L3 = [69~71], L5 = [−6~−4] |
| Struc1218 | M = [−21, −6, −2, 4, 29, 38, 48, 58, 66, 82], W = [−18, −10, −3, 30, 31, 41, 54, 84, 85], L2 = [26~27] |
| Struc1219 | M = [57, 80, 84, 92, 96], W = [−2, 13, 40, 44, 75, 91], D = [6, 7], I2 = [−10, −9], L2 = [20~21, 42~43], L3 = [31~33, 49~51], L4 = [70~73], L5 = [0~0] |
| Struc1220 | M = [−74, −64, −45, −36, −17, 10, 46], W = [−73, −49, −20, −19, −12, −3, 17, 34, 39, 43, 51, 62], D = [33], I1 = [−84, −83], L1 = [−88~−87, 37~38], |
| | L2 = [4~5, 20~21, 54~55], L3 = [−2~0] |
| Struc1221 | M = [−95, −80, −76, −73, −70, −51, −46, −31, 0, 22, 39, 43, 89, 93, 98], W = [−96, −84, −74, −52, −34, −32, −18, −13, 8, 11, 18, 19, 21, 23, 24, 50, 64, 66, 76, 77], |
| | D = [14], I2 = [−35, −34], I1 = [−29, −28], I4 = [−4, −3], I1 = [26, 27], I1 = [63, 64], |
| | L1 = [−22~−19, 68~73], L2 = [−90~−89, −65~−64], L3 = [54~58], L4 = [30~33] |
| Struc1222 | M = [−29, 5, 8, 18, 38, 44, 51, 63, 67], W = [−17, −4, −1, 14, 34, 56, 60, 74, 75], L1 = [28~33], L2 = [20~21, 53~54], L3 = [75~77] |
| Struc1223 | M = [−41, −12, 5, 21, 69, 78], W = [−63, −47, −46, −33, −21, −19, 9, 12, 20, 26, 52, 77, 79], D = [−13, 27, 50, 88], I1 = [−15, −14], I1 = [−4, −3], I9 = [14, 15], |
| | I1 = [58, 59], I3 = [96, 97], L2 = [−58~−57, 80~81], L3 = [−1~1], L15 = [90~93] |
| Struc1224 | M = [−14, −10, 16, 22, 26, 35, 52, 54, 58, 63], W = [−25, −13, −9, −7, −6, −4, 12, 23, 44, 53, 73, 74, 81, 88, 89], I1 = [−20, −19], I4 = [−18, −17], I10 = [93, 94], |
| | L2 = [7~8, 30~31, 84~85], L3 = [1~3], L4 = [76~79] |
| Struc1225 | M = [−85, −74, −40, −14, 10, 15, 17, 20, 31, 34, 43, 67, 69, 16], W = [−80, −76, −75, −69, −64, −63, −57, −22, −2, 11, 27, 35, 59, 60, 68, 71], I1 = [77, 78], |
| | L2 = [−96~−95, −55~−54, −1~0], L3 = [−60~−56] |
| Struc1226 | M = [45, 85, 93], W = [10, 12, 44, 68], D = [18], L10 = [0~0], L2 = [21~22, 75~76] |
| Struc1227 | M = [−81, −64, −51, −47, −36, −30, −27, −23, −13, −8, 0, 13, 18, 27, 35, 49, 51, 62, 68], W = [−84, −79, −72, −60, −25, −22, −1, 10], I13 = [78, 79], |
| | L2 = [−91~−90, −75~−74, 73~74] |
| Struc1228 | M = [−72, −39, −29, −7, 3, 6, 44, 54, 58], W = [−78, −57, −41, −23, −22, −1, 14, 16, 30, 55, 56, 79, 87, 89, 95, 96], D = [68, 69], |
| | L2 = [−81~−80, −54~−53, −43~−42, −17~−16, −11~−10, 8~9], L4 = [−70~−67] |
| Struc1229 | M = [34, 41, 43, 48, 60, 82], W = [−15, −14, 20, 25, 28, 36, 50, 65, 66, 72], I9 = [−20, −19], I1 = [−15, −14], I1 = [7, 8], I1 = [10, 11], I2 = [19, 20], |
| | L3 = [12~13], L7 = [0~2] |
| Struc1230 | M = [1, 19, 24, 61, 64, 68, 87, 91], W = [−29, −25, −23, −13, −1, 4, 12, 29, 30, 47, 48, 55, 65, 79, 81, 100], D = [−19, 57], I1 = [−21, −20], I1 = [59, 60], |
| | I14 = [78, 79], I13 = [80, 81], I4 = [84, 85], L2 = [−12~−11, 14~15, 37~38] |
| Struc1231 | M = [−76, −67, −64, −4, 10, 12, 54], W = [−83, −52, −29, −20, −19, 9, 17, 34, 35, 51, 62], D = [43, 44, 45, 46], I1 = [39, 40], L2 = [−46~−45], L3 = [−2~0] |
| Struc1232 | M = [−58, −53, −31, −13, −9, 6, 12, 39, 42, 65, 73, 90], W = [−40, −37, −8, 2, 13, 28, 40, 64, 70, 75], I2 = [−47, −46], L2 = [−27~−26], L3 = [25~27, 33~35, 66~68], |
| | L5 = [−4~0, 84~86] |
| Struc1233 | M = [−81, −64, −51, −47, −36, −13, −8, 0, 18, 34, 62], W = [−71, −60, −40, −30, −29, −22, −19, 5, 68, 74], D = [−73, −72, 41, 42, 43, 44], I2 = [−78, −77], I2 = [58, 59], |
| | L2 = [26~27, 50~51, 77~78], L4 = [68~71] |
| Struc1234 | M = [−93, −89, −64, −42, −12, −7, 8, 22], W = [−95, −84, −83, −79, −77, −51, −50, −40, 12, 16], D = [29], L4 = [−1~2] |
| Struc1235 | M = [−18, −14, 5, 12, 19, 48, 54, 66, 68, 71, 81, 84, 87, 90, 92], W = [−24, −22, 4, 21, 33, 56, 59, 61, 65, 73, 74], I1 = [14, 15], I1 = [15, 16], L1 = [−1~0], |
| | L2 = [41~43, 50~51, 77~78] |
| Struc1236 | M = [17, 36, 45, 49, 67, 75], W = [−15, 6, 29, 90, 96], I5 = [84, 85], L1 = [39~41], L2 = [−27~−26, −6~−5, 12~13], L3 = [−2~0, 92~93] |
| Struc1237 | M = [−32, −12, −2, 13, 17, 35], W = [7, 11, 18, 25, 65], L2 = [−6~−5, 5~6, 74~75] |
| Struc1238 | M = [−79, −64, −43, 11, 20, 27, 57, 71, 78, 86], W = [−99, −96, −73, −72, −45, −41, −39, −36, 23, 58, 81, 88, 89], D = [−28], I1 = [−14, −13], I1 = [−6, −5], I1 = [30, 31], |
| | L1 = [33~35], L2 = [−34~−33, −23~−22, 94~95], L3 = [−19~−9, 5~7], L4 = [−1~−1] |
| Struc1239 | M = [3, 7, 16, 22, 26, 31, 35, 43, 58, 61, 85], W = [−20, −9, −7, −6, −4, 13, 23, 29, 50, 81, 84, 89], D = [−14, 37, 38], I11 = [−23, −22], I10 = [92, 93], L9 = [−10~−10], |
| | L2 = [67~68, 76~77], L4 = [51~54], L13 = [−16~−16] |
| Struc1240 | M = [−57, −55, −34, −15, −9, −7, 6, 14, 19, 38, 44, 50, 65, 68, 78], W = [−67, −66, −65, −56, −40, −26, −17, −16, −6, −1, 8, 12, 23, 39, 54, 60, 66, 70, 74, 81, 90], |
| | L2 = [1~2, 30~31, 57~58], L3 = [−72~−68, 92~93] |
| Struc1241 | M = [−90, −67, −62, −53, −29, −9, −5, 0, 23, 41, 55], W = [−48, −44, −32, −24, −23, −12, −8, −1, 6, 9, 20, 22, 26, 27, 73, 76], D = [−49, 14, 15, 62], I4 = [−81, −80], |
| | I1 = [−76, −75], I3 = [−12, −11], I1 = [28, 29], I1 = [72, 73], L3 = [31~34], L4 = [−77~−77] |
| Struc1242 | M = [23, 33, 41, 64, 72], W = [−19, 21, 31, 51, 69, 82], I1 = [78, 79] |
| Struc1243 | M = [−24, −4, 10, 30, 41, 49, 59, 71, 79, 82], W = [−20, 4, 66, 72, 92, 99], I2 = [36, 37], I4 = [76, 77], L2 = [−7~−6] |
| Struc1244 | M = [−92, −90, −67, −31, −29, −15, −9, −5, 0, 27, 59, 66, 70], W = [−74, −66, −32, −24, −23, −12, −8, 6, 9, 25, 72, 73], D = [−53, −52, −49, 14, 15, 62], I5 = [−81, −80], |
| | I2 = [−73, −72], I1 = [72, 73], L4 = [−77~−76, 31~34] |
| Struc1245 | M = [25, 30, 59, 85], W = [−17, −13, 5, 10, 26, 31, 51, 83], L2 = [81~82], L5 = [37~40] |
| Struc1246 | M = [−87, −37, −30, −20, −15, 0, 20, 34, 42], W = [−86, −72, −13, 5], I3 = [−91, −90], L1 = [−98~−97], L2 = [−52~−51, 12~13, 50~51, 54~55, 66~67], L3 = [−75~−73] |
| Struc1247 | M = [−84, −81, −74, −67, −7, 1, 7, 28, 43, 48, 53, 57, 69, 75], W = [−96, −95, −62, −52, −25, −23, −22, 29, 45, 62, 7, 78, 90, 96], I1 = [−29, −28], L2 = [−50~−49] |
| Struc1248 | M = [−90, −67, −62, −29, −13, −9, −5, 0, 32, 34, 59, 73], W = [−77, −74, −66, −32, −24, −23, −12, −8, −1, 4, 6, 9, 22, 23, 71], D = [−53, −52, −49, 14, 15, 52], |
| | I5 = [−81, −80], I4 = [−78, −77], I1 = [75, 76] |
| Struc1249 | M = [−93, −88, −86, −81, −51, −48, −39, −6, 0, 15, 29], W = [−92, −77, −34, −31, −16, −9, −8, 4, 14, 41, 53], D = [−67, −66], I2 = [−3, −2], L2 = [8~9] |
| Struc1250 | M = [−17, −5, 2, 27, 44, 49, 51, 71, 14, 82], W = [−24, −22, −19, −2, 8, 22, 25, 30, 31, 64, 66], D = [47], I2 = [37, 38], L2 = [59~60] |
| Struc1251 | M = [−90, −53, −29, −25, −9, −5, 0, 15, 34, 70, 73], W = [−66, −34, −32, −24, −12, −8, −1, 6, 9, 22, 72], D = [−68, −67, −49, 27, 62], I5 = [−81, −80], I1 = [−73, −72], |
| | I1 = [−64, −63], I4 = [−62, −61], I1 = [24, 25], I1 = [75, 76], L2 = [−77~−76] |
| Struc1252 | M = [−80, −76, −67, −62, −31, −29, −9, −5, 0, 15, 34, 73], W = [−89, −32, −24, −23, −12, −8, −6, −1, 8, 9, 17, 22, 23, 26, 27, 71], D = [−53, −49], I9 = [−82, −81], |
| | I1 = [75, 76], L2 = [6~7, 60~62] |
| Struc1253 | M = [−21, 30, 38, 43, 79, 96], W = [−19, −18, −17, −6, −5, −2, 18, 34, 44, 73, 74, 76, 77, 87], D = [−8], I1 = [16, 17], I11 = [94, 95], |
| | L2 = [−23~−23, 8~10, 21~22, 26~27, 53~54, 66~67], L4 = [88~90] |
| Struc1254 | M = [−93, −64, −40, −6, 9, 15, 29, 38], W = [−94, −80, −77, −76, −55, −29, −16, −9, −8, −2, 4, 41, 51, 52, 57], L2 = [−89~−88, −72~−70, −48~−47], L4 = [−1~0] |
| Struc1255 | M = [−98, −82, −56, −41, −33, −17, 0, 23, 49, 56], W = [−95, −93, −69, −47, −36, −32, −5, 14, 30, 33, 50, 55], D = [−61, −60, −59], I1 = [−20, −19], L1 = [−46~−44], |
| | L2 = [−77~−76, 9~10], L3 = [−87~−85, −72~−70], L4 = [−11~−8], L5 = [36~40] |
| Struc1256 | M = [−84, −80, −68, 0, 17, 33, 36, 66, 84, 88], W = [−56, −53, −41, −31, −10, −8, −3, 5, 15, 25, 39, 44, 45, 82, 83], I5 = [−35, −34], I1 = [−11, −10], I2 = [28, 29], |
| | L2 = [−6~−4], L3 = [−77~−75, −60~−58, 7~9] |
| Struc1257 | M = [−31, −20, 9, 14, 16, 50], W = [−73, −70, −48, −44, −41, −37, −35, −34, −29, −26, −17, −14, −10, 24, 25, 44, 59, 65, 82], D = [−6, 40], |
| | I4 = [−93, −92], I2 = [−86, −85], I15 = [−75, −74], I12 = [−60, −59], I1 = [−47, −46], I5 = [−41, 40], I9 = [−38, −37], |
| | I12 = [−25, −24], I1 = [−11, −10], L1 = [−89~−88], L2 = [−51~−50, 35~36], L7 = [−28~−27], L10 = [−68~−63], L11 = [−82~−79] |
| Struc1258 | M = [−86, −80, −7, −60, −58, −49, −4, 9, 19, 28, 36, 48, 84, 88], W = [−78, −53, −38, −31, −26, −17, −6, −5, 24, 25, 39, 40, 4, 59], I2 = [−38, −37], L2 = [−9~−8] |
| Struc1259 | M = [−62, −56, 8, 69], W = [−90, −14, −61, −22, −8, 1, 13, 46, 53], I9 = [−73, −72], L1 = [−11~−9], L2 = [−53~−52, −29~−27, −19~−17, 35~36], L3 = [−5~−5, 58~50, 77~79] |
| Struc1260 | M = [−36, −19, −12, 0, 19, 23, 33, 42], W = [−40, −27, 4, 89], D = [2, 58, 59, 60, 61, 62, 63, 64, 65, 66, 67, 68, 69, 70, 71, 72, 74, 75, 76, 77, 78, 79, 80, 81, 82, 83, |
| | 84, 85, 86, 87, 88, 90, 91, 92, 93, 94, 95, 96, 97, 98], I1 = [3, 4], L2 = [26~27] |
| Struc1261 | M = [−38, −33, −5, −3, 0, 2, 19, 40, 52, 60, 66, 73], W = [−46, −43, −40, −36, −35, 23, 31, 59, 67, 77, 84, 93], I1 = [37, 38], L2 = [27~29], L3 = [96~98] |
| Struc1262 | M = [−70, −63, −56, −54, −23, −18, −14, −3, 0, 20, 23], W = [−98, −94, −81, −50, −33, −32, −15, 1, 17, 25, 32], D = [−76, −75, 38], I4 = [−13, −12], L2 = [−27~−26], |
| | L4 = [−89~−86] |
| Struc1263 | M = [−73, −66, −62, −52, −48, −38, −25, 0, 8], W = [−72, −49, −39, −22, −20, 1, 11, 27], D = [−34, −33, −10], I1 = [−13, −12], L3 = [22~24], L4 = [−82~−79] |
| Struc1264 | M = [−97, −40, −34, 0, 47, 50, 61, 78, 83, 96], W = [−92, −91, −73, −68, −46, −43, 1, 12, 14, 37, 38, 53, 81], D = [−21, −20, 55], I2 = [3, 4], L1 = [−9~−6], |
| | L2 = [−90~−89, 32~33, 64~65, 88~89], L3 = [69~71], L4 = [−15~−12], L5 = [−87~−83], L11 = [−60~−50] |
| Struc1265 | M = [−80, −71, −56, −41, −25, −10, 0, 20], W = [−63, −61, −34, 11, 12], D = [−33, −32, −15, 13], L12 = [−96~−94], L4 = [−49~−46], L6 = [23~25] |
| Struc1266 | M = [−70, −62, −50, −28, 24, 35, 44, 68, 99], W = [−99, −95, −85, −83, −74, −65, −63, −51, −22, −18, −16, −10, 1, 14, 16, 36, 45, 65, 70, 77, 78, 94], D = [−7], |
| | I1 = [−95, −94], I15 = [−88, −87], I3 = [−84, −83], I9 = [−81, −80], I15 = [−44, −43], |
| | I13 = [−32, −31], I1 = [−10, −9], L2 = [−48~−48, 37~38, 56~57], L6 = [−67~−66], L7 = [−58~−54], L11 = [−91~−91], L14 = [−77~−77, −37~−34] |
| Struc1267 | M = [−94, −92, −80, −73, −61, −31, −26, 25, 37, 45, 48, 54, 63], W = [−97, −70, −35, −30, 3, 4, 8, 17, 55, 62, 66, 74, 76, 79], D = [−5, −4], L2 = [60~61, 71~72] |
| Struc1268 | M = [−96, −84, −58, −55, −48, −39, −33, 6, 32, 34, 37, 53, 63, 65, 69, 81], W = [−88, −83, −17, −72, −71, −59, −46, −43, −22, 44, 45, 59, 68, 70, 82], |
| | L2 = [−91~−90, −37~−36, −22~−21], L3 = [−27~−25, 90~92] |
| Struc1269 | M = [−3, 0, 6, 31, 38], W = [−9, 8, 21, 41, 50, 70, 78], I1 = [29, 30], L2 = [42~43, 61~62, 96~97] |
| Struc1270 | M = [−73, −37, −19, −8, 0], W = [−75, −64, −46, −45, −32, −7, 3, 10, 13, 31, 32, 34, 37], I13 = [−66, −65], I3 = [48, 49], L2 = [−60~−59, −13~−12, 35~36, 53~54], |
| | L3 = [−68~−68], L7 = [−31~−25] |
| Struc1271 | M = [−79, −74, −69, 0, 27], W = [−77, −72, −71, −61, −57, −49, −38, −36, −9, −8, 11], D = [−59, −53, −40, −4], I1 = [−63, −82], I1 = [−63, −62], I1 = [−52, −51], |
| | I1 = [−7, −6], L2 = [−95~−94, −88~−87, −35~−33, −25~−24], L11 = [20~22], L6 = [11~14] |
| Struc1272 | M = [−26, −20, 0, 16, 22, 44, 54, 99], W = [−18, −9, 3, 8, 23, 28, 37, 41, 45, 12, 77, 79, 97], I2 = [31, 32], L4 = [−12~−10] |
| Struc1273 | M = [−60, −45, −29, −26, −5, 20, 53, 83, 93], W = [22, 60, 76, 78], D = [28], I5 = [41, 42], L3 = [−50~−48] |
| Struc1274 | M = [−48, −36, −21, −4, 17, 79, 96], W = [−9 −98, −91, −90, −60, −43, 20, 27, 62, 73, 74], D = [−30, 42, 43, 4], I1 = [−29, −28], L2 = [86~87], L3 = [−25~−24], L4 = [30~33] |
| Struc1275 | M = [−6, 0, 19, 55, 65, 73], W = [−9, 8, 52, 56, 70], I2 = [29, 30], L2 = [32~34, 61~62], L4 = [40~43] |
| Struc1276 | M = [−84, −78, −61, −54, −44, −27, −21, −17, 0, 14, 23, 27], W = [−92, −52, −46, −40, −22, −13, 30] |
| Struc1277 | M = [−94, −80, −71, −61, −49, −44, −34, −18, 45, 48, 68, 78, 95], W = [−90, −89, −69, −67, −57, −55, −30, −27, 1, 3, 4, 8, 9, 19, 20, 66, 82], D = [15, 16], I1 = [−66, −65], |
| | I2 = [19, 20], L1 = [−7~−5], L2 = [−76~−74, 53~54, 58~60, 71~72], L4 = [−26~−23] |
| Struc1278 | M = [−76, −69, −65, −54, −17, 0, 7, 17, 86, 90], W = [−93, −81, −56, 35, 50, 79], D = [−34, 45, 46, 47, 48, 49, 52], I2 = [29, 30], L5 = [−27~−27, 93~95] |
| Struc1279 | M = [−28, −24, 36, 41, 53, 61], W = [−38, −31, −29, −11, 11, 15, 19, 24, 55, 67], I1 = [−32, −31], I1 = [16, 17], I13 = [19, 20], I4 = [62, 63], L2 = [1~2, 9~10] |
| Struc1280 | M = [−82, −73, −62, −52, −48, −45, −33, −31, −21, −10, 15], W = [−72, −66, −44, −39, −30, −22, −20, −17, −16, 11, 12, 27], D = [−89], I1 = [−97, −96], L1 = [−26~−25], |
| | L2 = [−13~−12], L3 = [−69~−67] |
| Struc1281 | M = [−93, −86, −65, −50, 13, 25, 35, 38, 45, 53, 57, 69, 76, 78, 82], W = [−92, −76, −70, −54, −53, 1, 34, 51, 100], D = [−45, −44, −35, −11, −10, −7], I1 = [−77, −76], |
| | L2 = [−20~−19, 61~62], L3 = [−97~−97], L5 = [−23~−22] |
| Struc1282 | M = [−86, −62, −25, −17, 0, 33, 66], W = [−64, −63, −58, −3, 5, 6, 13, 14, 45, 54, 61, 70], I2 = [−43, −42], L1 = [80~81], L2 = [−54~−53, −50~−49, −21~−21, −8~−7, 21~22], |
| | L3 = [75~77], L4 = [37~40] |
| Struc1283 | M = [−92, −73, −61, −34, −29, −26, −15, 7, 45, 48, 67, 78], W = [−96, −90, −89, −85, −70, −35, −27, 3, 6, 18, 19, 20, 55, 61], D = [−5, −4], L2 = [−81~−80, −40~−39, 16~17] |
| Struc1284 | M = [−24, 0, 2, 19, 23, 36, 47, 61], W = [−37, −32, −31, −29, −11, −8, 1, 11, 55, 67], L2 = [9~10, 14~15] |
| Struc1285 | M = [−34, −23, −20, −9, 0, 17, 47, 80], W = [26, 70, 87], D = [24, 25], I2 = [−30, −29], L2 = [7~8, 98~99], L3 = [61~63], L6 = [34~39] |
| Struc1286 | M = [−58, −46, −42, −23, −18, 0, 38], W = [−98, −76, −55, −53, −33, −28, −9, 33], D = [−79, −78, −77], L2 = [−63~−62, −27~−26, −6~−5], L3 = [−95~−86], L4 = [−71~−70] |
| Struc1287 | M = [−80, −69, 0, 7, 16], W = [−76, −34, −21, 11, 12], L2 = [−49~−48, −41~−40, 21~22] |
| Struc1288 | M = [−90, −87, −37, −28, −25, −6, 21], W = [−80, −67, −54, −53, −46, −24, −15, −1, 26, 34, 35, 37], D = [−71, −70, −41, 40], I12 = [−16, −15], I15 = [−14, −13], |
| | I2 = [37, 38], L1 = [43~44], L2 = [27~28], L3 = [−65~−65], L12 = [−17~−17] |
| Struc1289 | M = [−16, −7, 35, 38, 57, 67, 69, 87], W = [−17, −6, 13, 45, 46, 78, 96], I2 = [−12, −11], L2 = [52~53, 76~77] |
| Struc1290 | M = [−22, 35, 48, 63, 72, 81, 93], W = [−24, −18, −16, 1, 4, 10, 21, 30, 31, 37, 82, 83, 94], D = [38, 39], L2 = [86~87], L3 = [−9~−7] |
| Struc1291 | M = [−19, 16, 26, 51, 61, 68, 72, 93], W = [−24, 1, 4, 10, 21, 22, 30, 39, 73, 94, 99], L2 = [82~83], L3 = [85~87], L4 = [33~38] |
| Struc1292 | M = [−69, −52, 0, 7, 17, 36, 44, 68, 73, 82], W = [−97, −55, −47, −45, −26, −5, −4, −3, 14, 52], D = [−34, 85], I1 = [88, 89], L2 = [−60~−59], L4 = [27~29] |
| Struc1293 | M = [−69, −61, −51, −48, −15, −11, −3, 13, 21, 23, 25, 67], W = [−84, −64, −58, −34, −22, −10, −6, 1, 7, 35, 45, 46, 53, 69, 70, 76, 82, 99, 100] |
| Struc1294 | M = [−91, −87, −64, −44, −34, −11, −8, −5, −3, 0, 12, 18, 25, 41, 46, 73], W = [−49, −45, −41, −33, −20, −19, −14, −4, 5, 6, 7, 23, 26, 40, 43, 69, 70, 77], D = [58, 59], |
| | I2 = [28, 29], I1 = [31, 32], L8 = [66~67], L1 = [−83~−80], L4 = [−57~−54], L6 = [34~35] |
| Struc1295 | M = [−9, −5, 0, 19, 44, 52, 60, 89], W = [−34, −20, 3, 23, 31, 38, 59, 79, 86, 87, 91, 93, 99], I1 = [−23, −22], L2 = [−26~−27, 27~29, 35~36, 84~85] |
| Struc1296 | M = [−12, 0, 13, 15, 21, 29, 34, 82, 84], W = [−32, −27, −20, 33, 35, 79, 80], D = [−9, −8, 38], I1 = [31, 32], I8 = [43, 44], I1 = [44, 45], I8 = [47, 48], |
| | L2 = [60~61, 95~96], L3 = [73~75] |
| Struc1297 | M = [4, 17, 41, 80, 89, 95], W = [−16, −15, −13, −12, −5, 7, 9, 10, 21, 31, 40, 60, 86, 98], D = [−2], I12 = [−10, −9], I6 = [5, 6], I1 = [68, 59], L2 = [57~58, 91~92] |
| Struc1298 | M = [−93, −90, −87, −83, −55, −42, −34, −30, 21], W = [−81, −76, −66, −58, −5, −1, 26, 34, 35, 37, 42], D = [−71, −70], I2 = [−68, −67], I1 = [−47, −46], I13 = [−10, −9], |
| | I2 = [−8, −7], L3 = [38~40], L2 = [−25~−25, 27~28], L11 = [−13~−13], L13 = [−16~−16] |
| Struc1299 | M = [−68, −17, −7, 7, 10, 17, 25, 35, 67, 77], W = [−61, −48, −5, 28, 30, 83, 88], D = [−34], I1 = [−47, −46], I1 = [28, 29], L2 = [−92~−91, 0~1, 38~39, 84~85], |
| | L4 = [−62~−57, 30~33] |
| Struc1300 | M = [−34, 37, 47, 54, 82, 99], W = [−33, −23, −22, −12, −5, −3, 12, 16, 59, 60, 71, 98], D = [−11, −10, −9, 23, 24], I1 = [92, 93], L2 = [0~0], L3 = [−38~−36] |
| Struc1301 | M = [−46, −42, −37, −12, 0, 9, 35, 40, 97], W = [3, 11, 23, 57, 71, 82, 83, 88], I7 = [47, 48], L3 = [89~91], L5 = [64~68] |
| Struc1302 | M = [−93, −75, −69, −54, −23, −9, 57, 75, 83, 92], W = [−96, −92, −68, −60, −59, −51, −50, −16, −15, 28, 45, 46, 47, 56, 61, 78, 94, 97, 100], D = [67], I2 = [−39, −38], |
| | L2 = [−63~−62, −44~−43, −31~−27, 26~27, 35~36, 52~53, 69~70], L3 = [−85~−83], L5 = [38~42] |
| Struc1303 | M = [−79, −57, −53, −42, −36, −22, −14, −4, 11, 77, 84], W = [−82, −70, −69, −51, −41, −23, −21, 6, 28, 43, 48, 50, 72, 78, 89], D = [42], I2 = [−27, −26], I1 = [92, 93], |
| | L2 = [−60~−59, −20~−19, −9~−8, 0~0, 3~5, 19~20, 64~65, 96~98], L3 = [51~53] |
| Struc1304 | M = [−53, −42, −20, 4, 16, 36, 60, 74, 80, 94], W = [−81, −80, −47, −45, −31, −30, −8, −1, 14, 19, 26, 27, 55, 56, 76, 82, 85], |
| | D = [−72, −71, −70, −69, −68, −67, −66, −60, −59, −58, 44, 45], L2 = [−39~−38, −34~−33], L3 = [31~33, 40~41] |
| Struc1305 | M = [−54, −26, −17, −8, 0, 17, 38, 48, 56, 73], W = [−58, −53, −9, 6, 55, 61, 65, 66, 72], I2 = [−45, −44], L1 = [−70~−68], L2 = [−90~−89, −60~−59, 33~34], L3 = [75~77] |
| Struc1306 | M = [−16, −12, −7, 5, 21, 27, 32, 40, 51, 55, 62, 94], W = [−45, −15, −1, 17, 20, 29, 48, 50, 58, 73, 79, 80, 81], D = [−53, −35, 67, 68], I1 = [−32, −31], I6 = [9, 10], |
| | I2 = [73, 74], L1 = [97~99], L2 = [−48~−47, −40~−38, 37~38, 85~86] |
| Struc1307 | M = [−83, −6, −58, −49, −23, −18, −15, −12, 16, 35, 38, 52, 57, 69], W = [−80, −59, −57, −4, 34, 77], D = [−96, −95], I1 = [−37, −36], L2 = [−91~−90], L3 = [−30~−30], |
| | L4 = [−76~−73, 72~75] |
| Struc1308 | M = [−26, 6, 18, 28, 33, 35, 79], W = [−27, −16, −10, −9, −5, 7, 21, 40, 52, 74, 91, 92, 94], D = [−1], I1 = [2, 3], I1 = [73, 74], L2 = [43~44], L3 = [58~60, 95~97] |
| Struc1309 | M = [0, 23, 40, 46, 50, 58, 63, 73, 86, 97], W = [−17, 15, 62, 67, 69, 72, 87, 90], L2 = [32~33], L3 = [−13~−12] |
| Struc1310 | M = [−39, −25, −17, 18, 24], W = [−71, −47, −18, 7, 13, 14, 16, 20, 21, 27], D = [−90, −89, −88, −87, −86, −85], L9 = [−14~−12], L3 = [−2~0] |
| Struc1311 | M = [−9, 0, 43, 61, 80, 89], W = [−6, −5, −3, 6, 16, 20, 30, 39, 40, 63, 71, 94, 97, 98], L2 = [56~57, 66~67], L3 = [34~36] |
| Struc1312 | M = [−81, −52, −46, −23, 0, 31, 33, 94], W = [−80, −75, −47, −45, −31, −30, −8, 4, 27, 64, 73, 78, 82, 85], D = [−39, 74, 75], I1 = [−43, −42], I2 = [81, 82], |
| | L2 = [−60~−58, 79~80], L3 = [−35~−33, 16~18, 35~37], L7 = [−74~−66] |
| Struc1313 | M = [−34, 12], W = [−71, −49, −16, 7, 18, 20], L9 = [−72~−72], L2 = [−48~−47, −26~−25], L3 = [−2~0], L4 = [−90~−88, −82~−78] |
| Struc1314 | M = [−89, −68, −65, −50, −26, −18, −8, 17, 56], W = [−77, −76, −72, −67, −57, −23, 34, 54, 61, 65, 72, 78, 82], L2 = [76~17], L3 = [−60~−58] |
| Struc1315 | M = [−64, −44, −34, −21, −8, −5, −3, 5, 12, 16, 18, 35, 37, 41, 46, 59], W = [−85, −41, −33, −27, −20, −19, −14, −4, −1, 6, 23, 40, 53, 58, 61, 62, 77], |
| | D = [44, 66, 67, 68, 69], I1 = [−92, −91], I1 = [−87, −86], I8 = [28, 29], L2 = [−81~−75, 24~25], L4 = [−57~−54] |
| Struc1316 | M = [−91, −80, −25, −17, 7, 17, 36, 45, 68, 74, 88], W = [−87, −70, −60, −49, −11, −1, 14, 15, 30, 31, 40, 62, 73, 83], D = [−56], I1 = [−97, −95], I15 = [−90, −89], |
| | I2 = [−88, −87], I15 = [−87, −86], I1 = [−59, −58], L2 = [0~1, 24~25, 84~85], L3 = [27~28], L4 = [−47~−44], L5 = [−9~−5] |
| Struc1317 | M = [−88, −84, −60, −49, −37, −32, −21, 24, 29, 53, 61, 64, 14], W = [−83, −79, −72, −63, −56, −42, −33, 8, 11, 18, 27, 36, 40, 57, 62, 71, 72, 18, 90, 95], |
| | D = [−3, 82, 83, 84], I1 = [−78, −77], I3 = [78, 79], L2 = [32~33], L4 = [−18~−14] |
| Struc1318 | M = [−24, −11, −7, 20, 33, 51, 79, 84, 97], W = [−27, −5, −4, 11, 82, 91, 94], D = [−1], I1 = [2, 3], I4 = [72, 73], L2 = [43~44], L3 = [5~6] |
| Struc1319 | M = [−36, −18, −10, 70, 74, 93], W = [−45, −40, −19, −11, −1, 10, 13, 18, 19, 37, 42, 50], I3 = [−50, −49], I8 = [−34, −33], I5 = [13, 14], I5 = [16, 17], I1 = [21, 22], |
| | I1 = [29, 30], I15 = [31, 32], I14 = [32, 33], I15 = [33, 34], I1 = [37, 38], I3 = [40, 41], I11 = [42, 43], |
| | I14 = [44, 45], I2 = [66, 69], I5 = [97, 98], L1 = [−44~−43], L2 = [−54~−53, −22~−21, 11~12, 24~25, 26~27], L5 = [4~7], L6 = [−31~−31] |
| Struc1320 | M = [−36, −18, −10, 70, 74, 93], W = [−45, −40, −19, −11, −1, 10, 13, 18, 19, 37, 42, 50], I3 = [−50, −49], I8 = [−34, −33], I5 = [13, 14], |
| | I5 = [16, 17], I1 = [21, 22], I1 = [29, 30], I15 = [31, 32], I14 = [32, 33], I15 = [33, 34], I1 = [37, 38], I3 = |
| | [40, 41], I11 = [42, 43], I14 = [44, 45], I2 = [65, 69], I5 = [97, 98], L1 = [−44~−43], L2 = [−54~−53, −22~−21, 11~12, 24~25, 26~27], L5 = [4~7], L6 = [−31~−31] |
| Struc1321 | M = [8, 24, 40, 58, 62, 73, 77, 80, 83, 91, 94], W = [30, 37, 41, 55, 56, 57, 61, 69, 87, 96], I1 = [3, 4], L2 = [−2~0], L4 = [44~47] |
| Struc1322 | M = [−76, −66, −40, −34, −10, 0, 61, 66, 78, 80, 83, 99], W = [−92, −68, −54, −46, −43, −1, 5, 14, 24, 37, 38, 40, 53, 67, 86], D = [−51, −50, −37, −19, 2, 63], |
| | I2 = [−54, −53], L2 = [−97~−96, −60~−59, 32~33, 70~71, 88~89], L5 = [46~50], L7 = [−91~−83] |
| Struc1323 | M = [−95, −88, −70, −48, −46, 0, 5, 7, 49, 57], W = [−50, −17, −5, 28, 35, 36, 39, 40, 45, 83], D = [−37, −35, −35], I2 = [28, 29], I1 = [90, 91], L1 = [85~86], |
| | L2 = [−9~−8, 33~34], L3 = [−62~−60, 15~17] |
| Struc1324 | M = [−91, −88, −72, −62, −52, −46, −37, −30, −26, −10, 0, 2, 11], W = [−87, −42, −41, −27, −23, −22, −1], D = [−40, 30], L1 = [25~26], L2 = [−18~−15] |
| Struc1325 | M = [−87, −85, −81, 35, 57, 77], W = [−82, −68, −51, −22, −10, 1, 13, 14, 32, 45, 46, 61, 76, 78, 94], D = [−37, −36, −35, −34, −33, −32, −31, −30], I2 = [−98, −97], |
| | I1 = [−56, −55], L1 = [48~49], L2 = [−63~−62, −19~−18, −9~−8, 83~84], L3 = [−77~−75, 38~40, 51~53] |
| Struc1326 | M = [51, 57, 64], W = [−34, −26, 55], D = [12, 38], I5 = [16, 17], I13 = [19, 20], I1 = [35, 36], L10 = [−12~−10], L3 = [−28~−27, −7~−5, −2~1], L4 = [5~8] |
| Struc1327 | M = [−31, −9, 0, 2, 7, 15, 19, 36, 51], W = [−32, −29, −26, −11, −1, 1, 12, 24, 55, 62], L2 = [63~64], L3 = [9~11], L4 = [−24~−21] |
| Struc1328 | M = [−51, −48, −35, −16, 32, 40, 62, 86, 89], W = [−76, −43, −33, −15, −13, 11, 27, 29, 31, 48, 50, 53, 58, 73, 74, 80], D = [−30, −29, 3, 54, 55, 56, 57], I6 = [−77, −75], |
| | I1 = [−40, −39], L1 = [−63~−62, −55~−54, 7~10, 65~67], L2 = [94~95], L3 = [70~71, 97~99], L4 = [−2~−2], L6 = [−72~−70], L11 = [−9~−6] |
| Struc1329 | M = [−82, −77, −73, −62, −60, −52, −48, −40, −38], W = [−76, −72, −49, −39, −20, −17, 11], D = [−10], I1 = [−13, −12], I1 = [13, 14], I1 = [29, 30], |
| | L2 = [−70~−69, −26~−25, −1~0], L4 = [21~25], L15 = [−96~−94] |
| Struc1330 | M = [−87, −64, −44, −34, 5, 12, 18, 35, 41], W = [−85, −52, −45, −41, −33, −32, −19, −14, −4, −3, 6, 23, 28, 40, 53], D = [−77, −76, −75, 61], I2 = [−92, −91], |
| | I1 = [−1, 0], I6 = [23, 24], L1 = [−10~−9, 67~70], L2 = [−6~−5, 44~46, 56~57], L3 = [26~27], L4 = [−56~−53] |
| Struc1331 | M = [−97, −81, −70, −53, −46, 0, 2, 5, 7, 12, 33, 47, 49, 57], W = [−80, −72, −50, −23, −5, 10, 28, 65, 73], D = [−36, −35], I2 = [28, 29], I2 = [81, 82], L2 = [−9~−8], |
| | L3 = [15~17], L4 = [84~65], L7 = [−63~−57] |
| Struc1332 | M = [−97, −90, −81, −61, −58, −18, 45, 52, 82, 86], W = [−96, −92, −69, −68, −4, 1, 35, 36, 47, 77], D = [−30, 17, 99], I4 = [−5, −4], I1 = [13, 14], |
| | L1 = [−50~−49, −15~−11], L2 = [−76~−75], L3 = [−42~−41, 72~14] |
| Struc1333 | M = [−82, −71, −67, −64, −27, −22, −8, 0, 4, 28, 35, 41, 43, 81, 88], W = [−76, −56, −55, −54, −21, −6, −3, 5, 18, 44, 49, 50, 57, 76], I1 = [−30, −29], I1 = [59, 60], |
| | L8 = [−96~−89], L2 = [8~9, 63~64], L4 = [72~75], L5 = [−16~−12] |
| Struc1334 | M = [−87, −83, −53, 0, 3, 15, 18, 29, 49, 64, 80, 85, 97], W = [−93, −92, −71, −49, −39, −34, −15, 8, −5, 43, 44, 70, 75, 89, 96], D = [−46, −45, −44, −23, 35, 38, 39, 61], |
| | L1 = [52~54], L2 = [−78~−77, −65~−64, −60~−59, −21~−20, 66~67, 76~77, 90~93], L3 = [−32~−30, 25~26] |
| Struc1335 | M = [−89, 0, 15, 27, 36, 46, 98], W = [−95, −94, −81, −76, −59, −56, −50, −44, −41, −39, −38, −34, −33, −32, −30, −29, −21, −11, 2, 28, 35, 37, 47, 56], |
| | D = [86], I2 = [−81, −80], I5 = [−76, −75], I14 = [−71, −70], I15 = [−70, −69], I15 = [−69, −68], I6 = [−66, −57], |
| | I1 = [−53, −62], I12 = [−59, −58], I12 = [−57, −56], I15 = [−50, −49], I5 = [−48, −47], I1 = [−32, −31], I1 = [−27, −26], I6 = [−23, −22], I15 = [−21, −20], |
| | I14 = [−19, −18], I1 = [89, 90], L1 = [−86~−84, 50~51], L2 = [−14~−13, 31~32, 73~77], |
| | L3 = [−43~−43, 40~42], L4 = [62~68], L6 = [−53~−53], L7 = [57~58] |
| Struc1336 | M = [−77, −55, −11, 10, 18, 20, 42, 56, 59], W = [−93, −78, −58, −14, 3, 6, 31, 57, 70, 75, 76, 86, 91], L2 = [−36~−36, 38~39, 87~88], L3 = [−2~0] |
| Struc1337 | M = [0, 28, 46, 56, 85, 89, 92, 95], W = [19, 21, 25, 27, 51, 81], D = [−11], I3 = [−6, −5], I1 = [4, 5], I2 = [13, 14], L2 = [69~70], L3 = [74~76] |
| Struc1338 | M = [−21, −6, 0, 31, 35, 41, 55], W = [−30, −27, −18, −12, −10, −3, 7, 19, 36, 38, 75, 79, 81, 86, 89], D = [98, 91], I15 = [15, 16], I1 = [25, 26], I1 = [65, 66], |
| | I1 = [93, 94], L1 = [21~22, 60~61], L2 = [−33~−32, −26~−25, 82~83, 95~96], L14 = [−17~−17] |
| Struc1339 | M = [−94, −85, −83, −73, −67, −5, 0, 4, 9, 26, 52, 59, 61, 66, 69], W = [−80, −65, −55, −54, −52, −43, −42, −34, −4, 12, 17, 27, 30, 32, 41, 57, 65], D = [−25], |
| | I2 = [−53, −52], I2 = [−39, −38], I1 = [−10, −9], I14 = [20, 21], I2 = [21, 22], L1 = [−60~−58], |
| | L2 = [−79~−78, −70~−69, −47~−46, −19~−18], L3 = [25~26, 38~40], L4 = [−33~−31, −15~−13], L5 = [34~35] |
| Struc1340 | M = [−14, 0, 3, 12, 32, 47], W = [−5, 7, 10, 24, 33, 39, 52], D = [40, 41], L2 = [28~29, 78~79, 86~87] |
| Struc1341 | M = [−16, 28, 32, 51, 61, 66, 73, 97], W = [−21, −4, 54, 62, 64], I2 = [39, 40], L2 = [23~24], L3 = [−2~0], L4 = [43~46] |
| Struc1342 | M = [7, 45, 64, 84], W = [−5, 29, 38, 43, 79], D = [68], L2 = [36~37, 75~76], L3 = [30~32, 70~72] |
| Struc1343 | M = [−5, 0, 85], W = [−15, −3, 7, 17, 32, 42, 47, 53, 66, 71, 84, 91], D = [24, 61], I5 = [−16, −15], I1 = [64, 65], L2 = [50~51], L4 = [27~30, 37~40], L7 = [−20~−20] |
| Struc1344 | M = [0, 15, 40, 46, 48, 67, 69, 78, 94], W = [−21, −17, −7, −5, 2, 22, 38, 43, 52, 56, 75, 77, 80], D = [−16, −15, −14], I1 = [−9, −8], I2 = [−7, −6], I5 = [22, 23], |
| | I15 = [23, 24], I12 = [24, 25], I5 = [72, 73], L3 = [30~32] |
| Struc1345 | M = [−77, −23, −14, −5, 0, 17, 25, 28, 43, 47, 49, 60, 87], W = [−83, −78, −62, −46, −42, −41, 35, 31, 32, 42, 55, 94, 100], D = [−31, 39], I2 = [31, 32], L1 = [70~79], |
| | L2 = [−56~−55, −45~−44], L3 = [95~97] |
| Struc1346 | M = [−76, −46, −43, 36, −22, −18, −10, 0, 4, 44, 47, 86], W = [−96, −90, −84, −78, −77, −53, −45, −29, −20, −15, −13, −4, 43, 45, 49, 50, 54, 63, 66, 95], I4 = [−99, −98], |
| | I4 = [−84, −83], L2 = [−62~−61, 27~28], L3 = [−58~−56, 91~93] |
| Struc1347 | M = [−83, −75, −70, −61, −57, −41, −5, 0, 5, 15, 35], W = [−77, −30, −14, −13, 25, 28, 42, 43, 47], D = [−31, 26, 41], I4 = [30, 31], I1 = [46, 47], L2 = [−23~−22] |
| Struc1348 | M = [−76, −47, −21, −16, 47, 68, 72, 79, 81, 84], W = [−74, −13, −5, 6, 27, 34, 38, 50, 77], D = [−34], I2 = [−28, −27], L2 = [−90~−89, −66~−65, 15~16], L3 = [−2~0], |
| | L5 = [−95~−93] |
| Struc1349 | M = [−83, −67, −51, −43, −39, 0, 12, 23, 47, 52, 56, 67, 69, 87, 89], W = [−96, −90, −85, −65, −57, −50, −27, −26, −4, 51, 84, 90, 92], D = [−8], I13 = [−20, −19], |
| | L2 = [−36~−36, 36~37, 59~60], L3 = [−75~−73, −12~−11, 71~73, 79~81] |
| Struc1350 | M = [−9, 38, 45, 48, 93, 96], W = [−17, −16, −2, 24, 26, 91, 99], D = [70, 71, 72, 73, 74, 75, 76, 77, 78], L2 = [−19~−18, 21~22, 30~31], L3 = [1~3] |
| Struc1351 | M = [0, 2, 4, 20, 27, 45, 58, 63, 66, 91, 99], W = [5, 24, 44, 48, 67, 95], L2 = [75~75, 87~88], L3 = [31~33, 49~51, 68~70] |
| Struc1352 | M = [−14, −9, 0, 15, 28, 37, 55, 65, 71, 85, 91], W = [−12, −10], I2 = [40, 41], L1 = [96~97], L10 = [49~51], L3 = [−18~−16] |
| Struc1353 | M = [−15, −9, −5, 0, 28, 53, 60, 63, 69, 81], W = [−21, −16, 36, 49, 83, 86], D = [40, 41, 77], L2 = [30~31] |
| Struc1354 | M = [−98, −92, −87, −73, −70, −56, −49, −27, −17, 35, 39, 46, 49, 65], W = [−85, −30, −28, −18, −10, 24, 34, 88], D = [61, 62], I1 = [−39, −38], I4 = [−9, −8], |
| | L2 = [−44~−43, 19~21, 69~70, 78~79], L3 = [0~2] |
| Struc1355 | M = [0, 4, 66, 87, 90], W = [−22, −15, −5, 6, 9, 28, 29, 55, 56, 58], D = [12] |
| Struc1356 | M = [−86, −49, −6, 10, 14, 19, 24, 42, 50, 58, 63, 66, 69, 80], W = [−81, −71, −69, −65, −50, −37, −19, −4, −2, 41, 47, 54, 57, 70, 91, 94], D = [−10], |
| | I13 = [−91, −90], I10 = [−73, −72], I13 = [−70, −69], I1 = [−57, −56], I14 = [−55, −54], I13 = [−52, −51], |
| | I12 = [−41, −40], I11 = [−38, −37], I15 = [−30, −29], I12 = [−25, −24], I14 = [−21, −20], I15 = [−19, −18], L2 = [45~46, 52~53], L3 = [−27~−27, 35~37], |
| | L5 = [−96~−92], L6 = [−60~−60, 91~92], L8 = [−35~−34], L10 = [−64~−54], L14 = [−80~−78] |
| Struc1357 | M = [−10, −5, 0, 8, 23, 65, 69, 75, 81], W = [−14, 9, 28, 29, 30, 48, 76, 78, 79, 86], D = [62], I1 = [41, 42], I1 = [60, 61], L2 = [55~56] |
| Struc1358 | M = [−25, −14, 0, 9, 16, 27, 45, 99], W = [−5, −4, 3, 8, 29, 34, 44, 49, 57, 66, 74, 77, 78], D = [−8], L2 = [64~65] |
| Struc1359 | M = [12, 15, 30, 33, 37, 78], W = [24, 40, 44], I7 = [−11, −10], I8 = [51, 52], L2 = [−14~−14, 85~86], L3 = [−2~0], L5 = [71~75], L6 = [−20~−18] |
| Struc1360 | M = [−19, −17, −3, 0, 16, 38, 52, 69, 71, 75, 89], W = [−21, −5, 40, 56, 65, 67], L2 = [27~28, 78~80, 85~86], L3 = [31~34], L4 = [43~46] |
| Struc1361 | M = [−21, −3, 0, 16, 22, 29, 32, 51, 67, 79, 83, 88, 93], W = [−16, −5, −4, 17, 21, 24, 26, 33, 36, 44, 71, 74, 84, 85], L2 = [−15~−14], L6 = [36~40] |
| Struc1362 | M = [−20, −16, 0, 30, 37, 40, 51, 61, 68, 89], W = [−15, −11, −3, 7, 32, 33, 47, 53, 54, 62, 71, 84, 86, 91], L3 = [24~26] |
| Struc1363 | M = [0, 3, 23, 32, 40, 69], W = [−21, −20, −17, 10, 33, 39, 55, 56, 66, 77], L2 = [−15~−14, 78~79, 86~87] |
| Struc1364 | M = [0, 19, 69, 78], W = [−17, −16, −15, −14, −5, 9, 20, 45, 55, 56, 76, 84, 95], I1 = [94, 95], L2 = [−22~−21, 7~8, 23~24, 37~38], L3 = [31~33, 80~82] |
| Struc1365 | M = [14, 21, 41, 52, 84, 86], W = [−23, −20, −15, −14, 28, 29, 32, 33, 55, 62, 68], D = [−24, −19, −18, −17], L2 = [−5~−4], L3 = [0~2, 47~49] |
| Struc1366 | M = [−93, −82, −65, −48, −46, −18, −10, 0, 5, 29, 44, 49, 59, 62], W = [−69, −57, −45, −42, −15, −13, −4, 41, 43, 64, 94], D = [32, 33], I4 = [−37, −36], |
| | L2 = [−55~−54, 88~89], L3 = [−30~−28, 76~78] |
| Struc1367 | M = [−21, 0, 8, 47, 51, 67, 93], W = [−16, 9, 24, 43, 44, 49, 54, 61, 14, 76, 77], D = [32, 33], I2 = [39, 40], I13 = [97, 98], L2 = [−4~−3, 79~80], L3 = [27~28, 83~85] |
| Struc1368 | M = [0, 9, 16, 18, 27, 54, 56, 64, 74, 80, 99], W = [−14, −4, 15, 24, 25, 33, 44, 60, 66, 67, 77, 78, 89], L2 = [−8~−6] |
| Struc1369 | M = [−58, −34, 0, 4, 25, 28, 41, 57, 66, 76], W = [−57, −46, −45, −31, −13, 6, 43, 44, 82, 88], D = [−91, −90, −89, −88, −87, −86, −85, −29], L1 = [33~35], |
| | L2 = [−79~−78, −54~−53, 89~90], L3 = [−74~−72, −43~−41, 49~51], L6 = [−9~−5] |
| Struc1370 | M = [4, 21, 32, 62, 64, 67, 70, 77], W = [28, 30, 59, 80, 84, 85, 90], L2 = [37~38, 93~94] |
| Struc1371 | M = [0, 10, 23, 32, 37], W = [−21, −17, −15, −9, −1, −5, 34, 38, 40, 90, 92, 93], L1 = [54~50], L2 = [−12~−11, 28~29, 45~46, 83~84] |
| Struc1372 | M = [−16, −5, 16, 43, 51], W = [−20, −14, 24, 54, 71, 81], D = [79, 80], I4 = [59, 60], L1 = [32~33], L3 = [0~2, 67~69] |
| Struc1373 | M = [0, 3, 32, 45, 69, 72, 81], W = [−3, 4, 29, 34, 35, 55, 56, 64], D = [94], L1 = [77~78], L2 = [37~38] |
| Struc1374 | M = [−95, −79, −41, 17, 27, 41, 49, 89, 92, 94], W = [−94, −93, −92, −73, −64, −5, 40, 59, 78, 88], D = [−35, −34], L2 = [−27~−26, −14~−13], L3 = [0~2] |
| Struc1375 | M = [−62, −52, −42, −36, −7, −4, 0, 10, 64, 71], W = [−92, −59, −41, −18, −11, 21, 35, 36, 56], I10 = [−48, −4], I1 = [33, 34], L9 = [−30~−29], |
| | L2 = [−81~−80, −21~−21, 17~18], L3 = [−14~−12, 40~42] |
| Struc1376 | M = [−77, −70, −60, −49, −17, −11, −3, 0, 6, 12, 20, 30, 56], W = [−83, −82, −78, −27, −24, −22, 2, 26, 61, 62], D = [−25, 89], I1 = [−89, −88], I1 = [82, 83], |
| | L2 = [−86~−85, −15~−14, 16~17, 35~36, 72~73] |
| Struc1377 | M = [0, 12, 35, 45, 55, 64, 84, 95], W = [−22, −18, −5, −4, 20, 23, 28, 36, 44, 77, 87, 91], D = [−16, −12, 38], L2 = [68~69], L3 = [−21~−21, 31~33] |
| Struc1378 | M = [−93, −53, −37, −5, 0, 4, 22], W = [−99, −98, −90, −89, −87, −74, −67, −65, −64, −56, −55, −46, −42, −41, 17, 18, 36], D = [−24, −23, −22, 41], I1 = [−78, −77], |
| | L2 = [44~45], L3 = [−12~−10, 48~50] |
| Struc1379 | M = [−78, −50, −44, −41, −14, 0, 20], W = [−57, −46, −45, 18, 24, 28, 29, 43], L1 = [−66~−58], L3 = [30~31], L4 = [45~48] |
| Struc1380 | M = [0, 14, 21, 24, 41, 78, 84], W = [−23, −20, 28, 29, 32, 33, 55, 56, 62, 68], D = [−24, −19, −18, −17], L2 = [−5~−4, 86~87], L3 = [47~49] |
| Struc1381 | M = [−4, 0, 23, 61, 66, 74, 79, 84, 90], W = [−22, −20, −5, 6, 88], D = [55], L2 = [4~5], L3 = [−17~−15] |
| Struc1382 | M = [−96, −73, −71, −68, −65, −22, 0, 10, 18, 23, 28, 40, 45, 68], W = [−99, −89, −62, −14, −13, −6, 16, 22, 39, 41, 49, 50, 59, 73, 87, 89, 90, 93, 94], |
| | D = [−59, −58, −40, −17], I2 = [−56, −55], I1 = [−16, −15], L1 = [−83~−80], L2 = [−90~−90, −35~−35, 3~4], L4 = [33~36] |
| Struc1383 | M = [−19, 1, 22, 48, 93], W = [−17, −15, 2, 45, 54, 91], D = [70, 71, 72, 73, 74, 75, 76, 77, 78], L2 = [−7~−6] |
| Struc1384 | M = [0, 32, 36, 5, 64, 76], W = [1, 28, 29, 30, 38, 40, 43, 61, 75, 79], D = [68], L2 = [23~24, 45~46], L3 = [70~72] |
| Struc1385 | M = [−18, −7, −3, 0, 12, 38, 45, 55, 95], W = [−5, 28, 29, 46, 48, 76, 87], D = [77], I9 = [−21, −20], I3 = [73, 74], L2 = [23~24, 32~33, 61~62, 68~69, 81~82] |
| Struc1386 | M = [−6, 6, 15, 32, 46, 67, 76, 79, 89], W = [−5, 28, 29, 37, 38, 43, 60, 69, 77, 81], I2 = [85, 86], I8 = [91, 92], I2 = [99, 100], L2 = [19~20], L3 = [0~2] |
| Struc1387 | M = [−77, −64, −5, 0, 5, 33, 39, 78], W = [−93, −58, −57, −46, −45, −11, 17, 18, 25, 45], D = [−32], L1 = [8~9], L2 = [−83~−82, −42~−41, −24~−24, 49~50], L3 = [−56~−54] |
| Struc1388 | M = [−4, 24, 53, 87], W = [−26, −24, −20, −15, −5, 16, 21, 49], D = [40, 41], L1 = [−19~−16], L2 = [62~63] |
| Struc1389 | M = [0, 24, 40, 45, 61, 69, 78, 95], W = [−23, −5, 26, 46, 48, 79, 86, 87], D = [−19], I1 = [−23, −22], I5 = [−16, −15], L2 = [9~10, 37~38], L5 = [28~32] |
| Struc1390 | M = [−58, −34, 0, 4, 25, 28, 41, 57, 76], W = [−95, −57, −46, −45, −31, −13, 6, 43, 44, 82, 88], D = [−94, −93, −92, −91, −90, −89, −88, −29], L1 = [33~35], |
| | L2 = [−79~−78, −54~−53, 89~90], L3 = [−74~−72, −43~−41, 49~51], L6 = [−9~−5] |
| Struc1391 | M = [1, 22, 40, 50, 56, 62], W = [−22, −18, −16, −7, 41, 74], I9 = [23, 24], I15 = [95, 95], L3 = [28~29] |
| Struc1392 | M = [−34, 17, 54, 59, 63, 73, 80], W = [−41, −25, −9, 4, 5, 29, 67, 84, 85, 90, 91, 92], D = [87], I1 = [−15, −14], L2 = [−2~−1, 35~36, 38~39] |
| Struc1393 | M = [−79, −72, −70, −64, −58, −28, −21, −6, −3, 0, 27, 35, 53, 76, 87, 95], W = [−75, −68, −29, 6, 45, 61], I1 = [−12, −11], L2 = [−37~−35, 43~44], L3 = [−43~−41, 49~51] |
| Struc1394 | M = [−65, −49, −46, −36, −18, −10, 0, 5, 37, 41, 44], W = [−78, −53, −45, −41, −15, −13, −7, −4, 9, 43, 50, 64, 16], D = [48, 49], L2 = [77~78, 93~95], L3 = [31~33, 87~89] |
| Struc1395 | M = [−90, −69, −66, −40, −5, 0, 20, 36, 43, 47, 72, 83], W = [−99, −95, −89, −59, −43, −22, 6, 7, 11, 51, 59, 70, 71, 79], I3 = [−61, −60], I1 = [4, 5], |
| | L2 = [−88~−87, −33~−32, −25~−23], L3 = [53−55], L4 = [27−30], L6 = [−57~−52] |
| Struc1396 | M = [−21, −19, −14, 0, 5, 37, 56, 64, 68, 84, 87, 94], W = [−22, −5, 28, 29, 40, 91], L2 = [32~33, 73~14] |
| Struc1397 | M = [0, 4, 21, 29, 33, 36, 48, 69, 71, 95], W = [−23, −21, −18, −3, 1, 18, 37, 40, 83], D = [51], I2 = [−16, −15], I1 = [55, 56], L3 = [−13~−13], L4 = [43~46, 76~79] |
| Struc1398 | M = [−95, −93, 0, 10, 28, 33, 35, 45], W = [−99, −87, −75, −65, −46, −42, −41, −37, −14, 1, 41, 42], I1 = [−78, −77], L2 = [−58~−57, −54~−53, −11~−10, 47~48] |
| Struc1399 | M = [18, 32, 69, 73, 76, 79, 96], W = [−12, 2, 20, 37, 40, 81], I10 = [−12, −11], I1 = [35, 36], L1 = [28~29], L2 = [24~25, 45~46, 61~62, 86~88], L3 = [−3~0] |
| Struc1400 | M = [−79, −72, −70, −64, −58, −28, −21, −6, −3, 0, 27, 35, 53, 66, 76, 87, 95], W = [−94, −75, −68, −29, 6, 45, 61], I1 = [−12, −11], L1 = [−93~−90], |
| | L2 = [−37~−35, 43~44], L3 = [−43~−41, 49~51] |
| Struc1401 | M = [−16, −5, −3, 0, 10, 32], W = [−17, −15, −9, −7, 23, 33, 38, 40, 74, 92], I1 = [44, 45], L1 = [47~48, 54~60], L2 = [−12~−11, 83~84] |
| Struc1402 | M = [0, 4, 32, 50, 53, 56], W = [−17, 5, 28, 40, 64, 67, 81, 84], I3 = [−17, −16], I1 = [82, 83], I1 = [90, 91], L1 = [86~88, 95~96], L2 = [45~46, 63~69, 75~76], |
| | L3 = [−14~−14, −5~−3] |
| Struc1403 | M = [−32, 19, 40], W = [1, 9, 10, 24, 31, 35, 39, 48, 49, 50, 59, 71, 74, 78, 82], D = [−26, −19, −18, −17, −16, −4, −3, −2, −1, 0, 57, 58, 72], I2 = [53, 54], |
| | I1 = [67, 68], I1 = [91, 92], L2 = [−13~−11], L5 = [83~89] |
| Struc1404 | M = [8, 12, 27, 47, 61], W = [−1, 21, 22, 64, 76, 84], D = [4, 90, 91], I10 = [−1, 0], I2 = [41, 42], L1 = [37~39], L2 = [30~31], L4 = [94~97] |
| Struc1405 | M = [−23, −17, 1, 22, 35, 50, 62, 65, 71], W = [−7, 7, 12, 55, 57, 74], I9 = [23, 24], L3 = [28~29, 40~42] |
| Struc1406 | M = [−92, −85, −82, −78, −75, −63, −38, −31, −19, 0, 23], W = [−99, −83, −60, −51, −48, −7, 1, 6, 10, 16, 29, 39, 40, 46], |
| | D = [−54, −53, −52, 41, 53, 54, 55, 56, 57, 58, 59, 60], I1 = [43, 44], L2 = [−41~−40] |
| Struc1407 | M = [−13, 0, 23, 38, 41, 67, 70, 75, 84], W = [−10, 3, 21, 33, 55, 56, 63, 83], D = [29, 91, 92], I1 = [33, 34], I2 = [95, 96], L2 = [78~79], L3 = [−7~−5, 87~88] |
| Struc1408 | M = [−20, 53, 63, 66, 70, 87, 90], W = [−19, −10, 1, 6, 33, 42, 55], D = [40, 41], I14 = [−9, −8], L15 = [−7~−6], L2 = [−15~−15], L11 = [−1~−1], L4 = [−5~−5] |
| Struc1409 | M = [−19, 37, 56, 64, 68, 88], W = [−22, 28, 40, 91], L2 = [32~33], L4 = [−17~−14] |
| Struc1410 | M = [0, 95, 98], W = [−17, −16, 37, 38, 40, 85], D = [52, 53, 54, 55, 56, 57, 58, 59, 68], I1 = [32, 33], I1 = [72, 73], L1 = [28~29], L2 = [45~46, 78~79] |
| Struc1411 | M = [−93, −45, −41, 11, 34, 69, 75, 82, 94], W = [−71, −66, −65, −44, −34, 15, 16, 17, 22, 32, 33, 35, 40, 43, 53, 63, 79, 80, 81, 91], D = [−98, −51], I2 = [−77, −76], |
| | I13 = [−75, −74], I11 = [−74, −73], I12 = [−71, −70], I13 = [−66, −65], I13 = [−63, −62], I1 = |
| | [−49, −48], I13 = [−34, −33], I13 = [−30, −29], I3 = [−19, −18], I6 = [−15, −14], I15 = [−11, −10], I15 = [40, 41], I13 = [52, 53], L2 = [−7~−6, 8~9, 27~28, 57~58, 88~90], |
| | L3 = [−57~−54], L4 = [−38~−36, 48~49], L6 = [−90~−84, −25~−25, 0~2] |
| Struc1412 | M = [0, 31, 68, 74, 80], W = [−20, −11, 13, 15, 27, 28, 33, 52, 53, 55, 60, 75, 77], D = [14, 83, 84, 85, 86], I1 = [6, 7], I1 = [9, 10], I15 = [40, 41], I2 = [45, 46], |
| | I1 = [48, 49], I10 = [52, 53], L1 = [37~38], L2 = [22~23, 93~94], L3 = [−16~−14], |
| | L5 = [−8~−4], L7 = [55~58] |
| Struc1413 | M = [0, 41, 55, 60, 68], W = [−16, −14, 16, 24, 84, 87, 94], D = [30], I1 = [27, 28], L3 = [−5~−3] |
| Struc1414 | M = [−19, −17, −9, 0, 5, 23, 38, 46, 51, 78, 93], W = [−20, −15, −14, −13, 18, 20, 24, 34, 42, 44, 54, 65, 74, 76, 77, 99], I1 = [28, 29], I1 = [49, 50], L1 = [32~33], |
| | L2 = [67~68, 84~85], L3 = [39~41, 59~61] |
| Struc1415 | M = [−21, −6, 0, 21, 32, 45, 62, 64], W = [−5, 31, 35, 41, 42, 58, 67], D = [7, 54], I1 = [56, 57], L2 = [73~75, 89~92], L3 = [−14~−13], L4 = [35~37], L5 = [80~84], |
| | L13 = [26~27] |
| Struc1416 | M = [−38, −3, 0, 5, 28, 47, 52, 66, 75], W = [−68, −66, −62, −58, −37, −34, −32, −30, −29, −8, 18, 46, 49, 63, 76, 77, 79, 64, 89], D = [−74, −49, −45], I1 = [−72, −71], |
| | I15 = [−34, −33], I7 = [−30, −29], I14 = [−27, −26], I13 = [−21, −20], I1 = [41, 42], I1 = [44, 45], |
| | I1 = [61, 62], I4 = [79, 80], I11 = [82, 83], L1 = [−57~−55], L2 = [−52~−52, 56~58], L3 = [−63~−63], L4 = [65~88], L7 = [32~39], L14 = [−87~−77], L15 = [−23~−23] |
| Struc1417 | M = [−1, 12, 41, 65], W = [−89, −63, −38, −36, −18, −11, 3, 9, 10, 26, 28, 30, 32, 33, 42, 78, 79, 96, 97], I1 = [−90, −89], I1 = [−54, −53], I4 = [−46, −45], |
| | I9 = [−43, −42], I15 = [−29, −28], I1 = [−12, −11], I15 = [−9, −8], I11 = [−3, −2], I15 = [27, 28], I15 = [35, 36], |
| | L2 = [−82~−78, −49~−29, 47~48, 88~89], L3 = [−96~−95, −33~−31, 23~24, 51~53, 55~56], L4 = [−86~−86, −74~−71, −57~−56, 14~17], L5 = [−23~−21, 33~34], |
| | L6 = [5~6], L12 = [−40~−40], L14 = [−17~−17], L15 = [−60~−59] |
| Struc1418 | M = [−86, −51, −42, −22, −12, −1, 58, 63, 68], W = [−96, −91, −90, −79, −75, −55, −53, −37, −15, −9, −4, 6, 52, 75], D = [−93, −76, 19], I1 = [−73, −72], |
| | L2 = [−62~−61, 21~22, 25~26, 80~81], L3 = [−29~−27, 31~37], L4 = [−18~−17] |
| Struc1419 | M = [−98, −94, −85, −51, −42, −40, −36, 3, 45, 56, 62, 81, 84, 88], W = [−99, −78, −47, −46, −44, −13, −6, −5, −3, 5, 16, 23, 70, 83, 90], D = [−66], L1 = [31, 32], |
| | L2 = [−55~−54, 0~1, 39~40], L3 = [−77~−75], L5 = [33~34] |
| Struc1420 | M = [−10, −7, 25, 36], W = [−13, −11, 1, 10, 32, 33, 42, 71, 73], D = [43, 44, 62, 63, 64, 65, 66, 67, 68, 69, 70, 74, 75, 76, 77, 78, 79, 81, 82, 83, 84, 85, 86, 87, |
| | 88, 89, 90, 91, 92, 93, 94, 95], L2 = [7~8, 29~30, 49~50] |
| Struc1421 | M = [−94, −77, −75, −67, −59, −50, −44, 0, 7, 10, 25, 59], W = [−90, −80, −79, −47, −43, −37, −11, 1, 17, 18, 26, 37, 39, 42, 43, 84, 88], D = [−38, −23], I2 = [32, 33], |
| | L2 = [−56~−55, −14~−13, −6~−5, 86~87], L3 = [74~76], L7 = [90~91] |
| Struc1422 | M = [−4, 0, 30, 46, 49, 84, 89, 91], W = [−11, −8, 11, 20, 21, 57, 58, 61, 78], I6 = [78, 79], L4 = [3~4, 15~17], L6 = [−9~−9, 72~75] |
| Struc1423 | M = [−48, −45, −12, 0, 55, 59], W = [−93, −59, −54, −17, −5, 31, 46, 48, 75, 92], D = [43, 85, 86], I2 = [−91, −90], I14 = [−89, −88], I1 = [−88, −87], I2 = [31, 32], |
| | I1 = [47, 48], I2 = [89, 90], L2 = [−86~−85, 38~39], L5 = [−82~−82, −63~−62], L15 = [−58~−58] |
| Struc1424 | M = [3, 7, 27, 31, 47, 60, 92, 95, 97], W = [−4, 30, 36, 55, 67, 84, 85], I1 = [−1, 0], I2 = [33, 34], L1 = [38~41] |
| Struc1425 | M = [−96, −32, 8, 31, 34, 43, 45, 51], W = [−93, −75, −42, −14, 5, 6, 29, 30, 40, 47, 58], |
| | D = [−84, −83, −82, −81, −80, −79, −78, −17, −76, −72, −71, −70, −69, −68, −67, −66, −65, −64, −63, −62, −61, −39, −38, −37, −36], I1 = [−50, −49], I1 = [16, 17], |
| | L1 = [−19~−18], L2 = [−54~−53, 0~1], L3 = [−13~−12] |
| Struc1426 | M = [−95, −72, −68, −59, −42, −22, −9, 0, 4, 26, 28, 50, 61, 72, 83], W = [−45, −31, −10, −5, −3, −2, 17, 18, 21, 27, 47, 52, 67, 76, 87, 89, 94], D = [42], |
| | L1 = [−92~−91], L2 = [44~45, 77~78], L3 = [−66~−64, −56~−54, −30~−28, 33~35] |
| Struc1427 | M = [−75, −61, −23, 33, 40, 43, 60, 7], W = [−86, −4, −43, −18, 21, 52, 53, 56, 57, 62, 68, 98, 100], D = [69, 70], L1 = [−65~−64], L2 = [−11~−10], L4 = [−4~−1] |
| Struc1428 | M = [−96, −88, −73, −64, −21, 0, 6, 30, 59, 96], W = [−81, −80, −58, −3, 17, 27, 8, 93], D = [−29, −8, −7], I2 = [−3, −2], L2 = [−50~−49, −16~−15, 37~38, 71~72], |
| | L4 = [45~49] |
| Struc1429 | M = [−55, −49, −45, −28, 0, 17, 47, 29, 60, 93], W = [−83, −78, −62, −46, −42, 31, 42, 43, 55, 82, 100], D = [70, 71, 72, 73, 74, 75, 76, 80, 81], I2 = [30, 31], |
| | L2 = [−13~−12] |
| Struc1430 | M = [−65, −13, 10, 25, 39, 43, 59, 71, 74, 76, 80], W = [−85, −80, −79, −48, −42, 6, 37, 38, 84], I4 = [−53, −52], L1 = [−60~−56], L2 = [−44~−43, 31~32], |
| | L4 = [−3~0, 18~21], L7 = [85~87] |
| Struc1431 | M = [−16, −13, 0, 37, 44, 55, 68, 92], W = [−21, −20, −19, −15, −5, −4, 32, 74, 76, 80, 83, 85], L1 = [25~28], L2 = [77~78], L3 = [85~86], L5 = [30~31] |
| Struc1432 | M = [−83, −60, −50, −45, −43, −26, −10], W = [−98, −82, −81, −78, −76, −46, −39, −37, −36, −33, −32, −23, −22, −11, −9, 1, 6, 10, 22], D = [−66], I1 = [−65, −64], |
| | I2 = [−39, −38], I1 = [17, 18], L2 = [−92~−91, −31~−30], L3 = [−75~−73, −55~−53], L5 = [15~16] |
| Struc1433 | M = [−70, −65, −59, −50, −42, 0, 4, 16, 29, 41, 53, 55, 71, 98], W = [−95, −83, −56, −55, −53, −47, −33, −28, −23, −13, 15, 26, 28, 37, 38, 48, 50, 62, 72, 87, 100], |
| | I1 = [−75, −74], I15 = [−34, −33], I11 = [−32, −31], I7 = [−30, −29], I14 = [−28, −27], I15 = [−27, −26], |
| | I15 = [−20, −19], I15 = [−19, −18], I12 = [−13, −12], I2 = [66, 67], L2 = [−78~−77, −8~−7, 59~60], L3 = [−16~−16], L4 = [−88~−85, 77~83], L15 = [−24~−24, −5~−4] |
| Struc1434 | M = [−77, −67, −52, 0, 5, 17, 65, 85], W = [−41, −40, 22, 29, 32, 38, 39, 67, 70], I1 = [−7, −6], L2 = [−55~−54, −35~−35, 42~43], L3 = [−23~−21, −14~−13] |
| Struc1435 | M = [−94, −77, −73, −70, −67, −48, −43, −35, −31, −26, −24, 18, 22, 34, 70], W = [−93, −81, −71, −59, −53, −29, −10, 11, 24, 25, 69, 78, 79, 83], |
| | D = [−87, −16, 48, 49, 50, 51, 52], I1 = [−89, −88], I1 = [−13, −12], I3 = [42, 43], L2 = [−62~−61, 0~0, 7~8, 56~57, 73~74], L3 = [61~65], L6 = [37~40] |
| Struc1436 | M = [−92, −86, −72, −45, −40, −21, −12, 0, 4, 12, 22, 25, 50, 67, 71], W = [−84, −79, −22, −14, −13, 27, 28, 40, 41, 49, 72, 77, 83, 86], D = [33], I1 = [−60, −59], |
| | L8 = [87~94], L2 = [−54~−53, 35~36, 45~46, 63~64], L4 = [−76~−76], L6 = [−29~−27] |
| Struc1437 | M = [−92, −72, −46, −20, −13, −7, 1, 8, 20, 37, 43, 63, 71, 79, 93, 99], W = [−86, −76, −61, −60, −52, −47, −12, 16, 22, 64, 66, 75], D = [−78, −33], I1 = [−81, −80], |
| | I1 = [−40, −39], I2 = [−23, −22], L1 = [−28~−26], L2 = [−67~−66, −18~−18, 24~25, 34~35, 57~58] |
| Struc1438 | M = [−91, −79, −72, −69, −47, −31, −25, −23, 6, 12, 28, 49, 97], W = [−86, −84, −77, −71, −48, −46, −41, −35, −27, −16, −15, 3, 26, 33, 47, 69], D = [61, 52], |
| | I1 = [39, 40], L2 = [0~0, 24~25] |
| Struc1439 | M = [4, 17, 33, 69, 89], W = [−18, −15, −9, −1, 7, 10, 24, 50], D = [56, 57], I1 = [−19, −18], I11 = [−15, −15], I2 = [60, 61], L8 = [77~84], L1 = [−5~−4], |
| | L2 = [0~0, 22~23] |
| Struc1440 | M = [−27, 24, 43, 64, 67, 85, 92], W = [−39, −37, −26, −12, −5, 9, 32, 45, 56, 57, 70, 86], I15 = [−39, −38], I3 = [72, 73], L2 = [98~99], L3 = [0~2] |
| Struc1441 | M = [−52, −36, 10, 90], W = [−55, −28, −14, 39, 52, 58, 86, 91], I2 = [31, 32], L2 = [−78~−77, 23~24, 41~42, 46~47], L3 = [−2~0, 18~20], L4 = [−49~−45, 73~74] |
| Struc1442 | M = [0, 46, 70, 85, 92, 95], W = [−14, −11, 19, 27, 42, 50, 57, 58, 69, 81], L2 = [55~56], L3 = [3~4, 12~13, 74~76], L4 = [−9~−9, −4~−4] |
| Struc1443 | M = [−15, 1, 65, 71, 95], W = [−12, −1, 32, 37, 38], D = [−7, −6, −5, 68], I8 = [−12, −11], I1 = [−3, −2], I1 = [69, 70], L2 = [28~29, 78~79], L3 = [45~47, 56~58], |
| | L7 = [85~91] |
| Struc1444 | M = [−92, −89, −65, −4, 0, 5, 24, 75, 81, 84, 87, 89], W = [−99, −81, −7, −59, −54, −46, −45, −42, −41, −27, −14, 76, 92, 93], D = [−58, −57], I1 = [−52, −51], |
| | I1 = [16, 17], L1 = [31~33], L2 = [−49~−49, −26~−22, 39~40, 43~44, 48~49] |
| Struc1445 | M = [−83, −73, −71, −56, −12, 34, 43, 45, 51], W = [−42, −39, −38, −15, 7, 27, 29, 38], D = [−81, −80, −77, −61, 0, 1], I4 = [−53, −52], I1 = [−48, −47], I3 = [−39, −38], |
| | I1 = [−22, −21], I2 = [8, 9], L2 = [4~5], L4 = [−19~−16, 57~58], L7 = [−69~−64] |
| Struc1446 | M = [−21, 0, 21, 24, 69], W = [−9, 32, 33, 44, 74, 76, 86, 87], L2 = [55~56], L5 = [−16~−12] |
| Struc1447 | M = [−16, −12, −5, 0, 15, 58, 52], W = [−20, 40, 42, 44, 55, 75, 96], D = [28], L2 = [23~24, 86~87], L3 = [31~33], L6 = [96~99] |
| Struc1448 | M = [−14, −12, 0, 37, 55, 69], W = [−20, −17, −16, −5, 38, 42, 81, 86, 87, 98], D = [40, 41], L2 = [24~25, 28~29, 32~33, 45~46, 83~84, 94~95], L4 = [75~78] |
| Struc1449 | M = [−17, −15, 11, 44, 53, 64, 75, 78, 86, 95], W = [−26, −25, −7, −2, 12, 13, 17, 19, 41, 47, 58, 94], L2 = [−1~0], L3 = [−34~−32, 28~32], L4 = [35~36] |
| Struc1450 | M = [58], W = [14, 24, 55, 77, 83, 86], I1 = [−21, −20], I1 = [−19, −18], L1 = [−16~−14], L2 = [−3~−3, 31~33, 95~96], L7 = [0~0] |
| Struc1451 | M = [−38, −28, −6, 4, 12, 63, 82, 86], W = [−25, 21, 28, 72, 19, 81], D = [−42, 94, 95], I1 = [29, 30], I2 = [90, 91], L2 = [−2~−1, 17~18], L4 = [35~38] |
| Struc1452 | M = [−61, −23, −19, 5, 21, 33, 77, 95], W = [−82, −74, −73, −59, −48, −44, −28, −11, 41, 52, 56, 62, 98], D = [66, 67, 68], I1 = [−69, −68], |
| | L2 = [−76~−75, −66~−65, −36~−35, 42~43], L6 = [−4~1] |
| Struc1453 | M = [−6, −2, 6, 8, 16, 24, 43, 47, 52, 55], W = [−17, −12, −4, −3, −1, 29, 53, 56, 59], D = [−13, 35, 36], L3 = [89~91] |
| Struc1454 | M = [−17, 23, 32, 36, 83], W = [−20, 9, 14, 20, 21, 43, 44, 62, 74, 76, 77, 84], I2 = [43, 44], L2 = [40~41], L3 = [79~81], L4 = [0~7], L5 = [67~71] |
| Struc1455 | M = [−91, −72, −68, −64, −51, −42, −39, −28, −22, −14, 0, 10, 26, 34, 42, 72, 88, 93], W = [−90, −69, −53, −45, −40, −12, −5, −2, 4, 13, 17, 18, 21, 36, 52, 65, 90], |
| | L2 = [−60~−59, −55~−54, 50~51, 77~78], L4 = [58~61] |
| Struc1456 | M = [−90, −72, −69, −61, −58, −44, 40, 50, 80, 89], W = [−59, −41, −35, −27, −24, −18, −12, 4, 26, 31, 33, 47, 48, 69, 86, 87], D = [−14], I1 = [−16, −15], I3 = [−2, −1], |
| | I1 = [20, 21], L1 = [−88~−87, 16~17, 62~64], L2 = [−26~−25, 27~28, 70~71], L3 = [−93~−92, 1~2] |
| Struc1457 | M = [−75, −62, −12, 0, 52, 55, 59, 62, 91], W = [−94, −85, −57, −49, −41, −17, −1, 31, 47, 75, 88], D = [43], I15 = [−58, −57], I1 = [−31, −30], I2 = [31, 32], |
| | I1 = [44, 45], L2 = [86~87] |
| Struc1458 | M = [−67, −52, −42, −36, 17], W = [−90, −89, −76, −64, −34, −30, −16, 26, 33, 35, 38, 39, 51, 70, 76, 87], D = [65], I1 = [−80, −79], I1 = [−30, −29], I1 = [5, 5], |
| | I2 = [31, 32], L2 = [−87~−83, −78~−77, −14~−13, −6~−5, 89~90], L3 = [−56~−54, 0~3, 27~29, 67~69], L4 = [−23~−21] |
| Struc1459 | M = [21, 35, 51, 60, 64, 68, 76, 82], W = [−23, −5, 26, 29, 30, 40, 70, 71, 90, 99], L1 = [91~94], L2 = [−1~0], L3 = [4~6, 36~37] |
| Struc1460 | M = [−91, −86, −68, −52, −34, 11, 16], W = [−75, −51, −29, −22, −20, −1, 9], D = [−46, −45], L2 = [−89~−89, −81~−80, −37~−36], L3 = [−60~−58] |
| Struc1461 | M = [0, 28, 30], W = [−14, −12, −3, 7, 43, 51, 53, 62, 71, 84, 85, 91], L2 = [−16~−15], L3 = [24~26, 35~37, 39~40] |
| Struc1462 | M = [−17, −6, 16, 27, 99], W = [−22, −19, −14, 11, 44, 57, 66, 74, 77, 78], D = [−15, −2, −1, 0, 1, 2], L2 = [8~9, 63~64, 68~69], L4 = [−9~−9] |
| Struc1463 | M = [9, 19, 21, 32, 41, 46, 55, 64, 67, 84, 88, 99], W = [−5, −4, −1, 8, 17, 22, 44, 57, 74, 77, 78], D = [−8, 26, 27], L3 = [0~2, 15~16] |
| Struc1464 | M = [−95, −88, −86, −84, −77, −61, −48, −12, 32, 36, 47, 67, 73, 82], W = [−83, −80, −71, −70, −63, −57, −42, −34, −33, 29, 59], D = [−24, −23], I2 = [−37, −36], |
| | I5 = [92, 93], I2 = [97, 98], L1 = [8~9], L2 = [−68~−67, −15~−15, 0~0, 22~24], L3 = [−28~−28] |
| Struc1465 | M = [−87, −79, −56, −51, 6, 56, 62, 70, 90, 97], W = [−91, −64, −78, −69, −48, −47, −46, −37, −16, −15, −12, 26, 30, 47, 69, 78], D = [−42, −41, −40, −39, −38, −27], |
| | I1 = [39, 40], L2 = [0~0, 24~25, 73~74], L3 = [−24~−23] |
| Struc1466 | M = [−52, −40, −36, −34, −8, −1, 10, 17, 39, 46, 54, 63, 69, 73], W = [−74, −73, −71, −63, −61, −58, −41, −33, −25, −9, −3, 4, 29, 67, 84, 85, 93], D = [90, 91, 92], |
| | I1 = [82, 83], L3 = [79~80], L1 = [−67~−65], L2 = [−56~−56, 35~36], L11 = [−60~−60] |
| Struc1467 | M = [−94, −91, −36, −14, 0, 4, 37, 62], W = [−67, −52, −47, −46, −44, −3, −1, 5, 18, 23, 36, 83], D = [85], I11 = [−35, −34], I15 = [−32, −31], I4 = [40, 41], |
| | I1 = [88, 89], L2 = [−77~−76, 27~28, 31~32, 34~35, 44~45, 54~57, 72~73], L4 = [−56~−53] |
| Struc1468 | M = [−89, −84, −64, −52, −45, −42, −19, −1, 76, 81, 84, 89], W = [−90, −15, −68, −58, −55, −40, −39, −36, −26, −15, 6, −5, 28, 48, 73, 75, 91], |
| | D = [−93, 12, 13, 14, 31, 44], I1 = [46, 47], L8 = [5~6], L1 = [−79~−77, 34~37], |
| | L2 = [−98~−97, −71~−71, −62~−61, 22~23, 67~68], L3 = [−22~−22, −12~−10] |
| Struc1469 | M = [−91, −89, −76, −62, −55, −52, −41, −22, −18, 8, 56, 68], W = [−86, −78, −40, −36, −35, −33, −29, −19, 31, 32, 39, 41, 51, 76, 82, 92], D = [21], I15 = [−30, −29], |
| | I1 = [−5, −4], I2 = [41, 42], L1 = [−27~−26], L2 = [−10~−9, 28~29, 95~96], L3 = [−1~2, 43~44] |
| Struc1470 | M = [−97, −73, −70, −67, −48, −43, −35, −26, 18, 28, 34, 70], W = [−93, −81, −71, −59, −53, −45, −29, −28, 11, 16, 24, 25, 52, 54, 67, 69], |
| | D = [−87, −15, 58, 59, 60, 61, 62, 63, 64, 65], I1 = [−89, −88], I1 = [43, 44], L3 = [47~49], |
| | L2 = [−77~−76, −62~−61, −12~−12, 7~8, 74~75], L11 = [0~0], L7 = [37~39] |
| Struc1471 | M = [−80, −52, −45, −34, 0, 15], W = [−92, −51, −22, −20, −12, −1, 9], D = [−91], I1 = [−88, −87], L2 = [−37~−36, 10~11] |
| Struc1472 | M = [−54, −46, 45, 63, 75, 81, 85], W = [−97, −91, −77, −59, −42, −40, −38, −35, −32, −29, −24, −23, −9, −7, 1, 11, 16, 17, 25, 30, 38, 40, 41, 44, 47, 65, 70, 73, 76], |
| | D = [−90, −89, −88, −87, −86, −85, −84, −83, −82, −81, −80, −79, −73, 54], I13 = [−35, −34], I7 = [−31, −30], |
| | I11 = [−26, −25], I15 = [−24, −23], I15 = [−23, −22], I12 = [−20, −19], I15 = [−9, −8], I5 = [−7, −6], I15 = [2, 3], I11 = [14, 15], I3 = [76, 77], |
| | L2 = [−2~0, 19~20, 36~37], L3 = [−65~−63, 32~33], L5 = [−15~−13, 47~48], L6 = [65~68], L7 = [−51~−41], L8 = [25~27, 58~59] |
| Struc1473 | M = [−25, −11, −6, 6, 12, 27, 30, 76, 78, 81, 92], W = [−12, −3, −1, 2, 19, 29, 31, 42, 56, 57, 82, 86, 87], D = [−14], I1 = [42, 43], L8 = [−22~−18], |
| | L2 = [−36~−35, −32~−31], L3 = [43~44] |
| Struc1474 | M = [−83, −65, −55, −42, −11, 0, 5, 17, 23, 47, 56, 59, 78, 90], W = [−78, −58, −45, −32, −14, −13, 6, 31, 57, 70, 75, 76], D = [43, 44], I2 = [31, 32], |
| | L1 = [−36~−35], L3 = [81~83] |
| Struc1475 | M = [−98, −94, −81, −77, −74, −67, −47, −43, −35, −30, −15, −3, 36, 48, 51, 54, 73, 84], W = [−97, −69, −23, −1, 1, 8, 34, 35, 40, 50, 60, 86], |
| | D = [−90, −89, −63, −22, 81], I1 = [−55, −54], I1 = [77, 78], L2 = [−85~−84, −52~−51, −8~−7, 61~62, 65~66], L3 = [−59~−57, 92~94] |
| Struc1476 | M = [3, 19, 25, 31, 48], W = [−10, −2, 32, 56, 70], I7 = [−10, −9], I7 = [0, 1], I2 = [39, 40], L8 = [42~44], L2 = [16~17, 60~61] |
| Struc1477 | M = [−89, −87, −76, −54, −47, −35, 5, 8, 11, 19, 25, 34, 43, 48, 58], W = [−92, −80, −28, −7, 24, 54, 70, 72, 86, 88], D = [−25], I4 = [−28, −27], L1 = [−1~0], |
| | L2 = [−19~−15, 65~66, 73~14, 79~80], L5 = [−70~−66] |
| Struc1478 | M = [−87, −76, −69, −66, −54, −47, −35, 8, 17, 19, 25, 34, 43, 58, 63, 85], W = [−96, −95, −92, −44, −28, −7, 20, 23, 24, 39, 56, 72, 81, 86, 68], D = [−25], |
| | I4 = [−28, −27], L1 = [−1~0], L2 = [−19~−15, 47~48, 54~55, 65~66] |
| Struc1479 | M = [28, 46, 56, 91, 95], W = [−16, −7, 1, 21, 27, 51, 57, 58, 69, 81], D = [−2], L3 = [74~76, 85~87], L11 = [3~4], L4 = [−11~−10], L5 = [12~15] |
| Struc1480 | M = [−65, −53, −41, −19, 0, 5, 23, 80], W = [−28, −14, −1, 24, 52, 84], D = [85, 86], I1 = [−23, −22], I1 = [90, 91], L2 = [−78~−77, −57~−56, 10~12, 41~42, 46~47], |
| | L3 = [−48~−46, 18~20] |
| Struc1481 | M = [−49, −40, −30, −27, 15, 20, 57, 64, 98], W = [−87, −63, −39, −15, −13, −12, 9, 18, 71, 72, 75, 80, 81], D = [−98, −97, −96, −95, −94, −93, −92, −91, −90], |
| | L2 = [−20~−19, 25~26, 48~49], L6 = [−4~3] |
| Struc1482 | M = [−77, −61, −48, −41, −12, −10, 36, 55], W = [−95, −63, −57, −42, −34, −33, −13, 17, 29, 31, 49, 50, 77], D = [−24, −23, −18, 65], I1 = [−81, −80], I1 = [67, 68], |
| | I5 = [92, 93], L1 = [−1~0, 6~9], L2 = [−68~−67, −16~−15, 22~24, 72~73, 81~82], L4 = [−88~−84, −29~−28] |
| Struc1483 | M = [−97, −87, −69, −66, −62, −59, −47, −35, −19, −12, 37, 63], W = [−92, −80, −79, −16, −7, −5, −2, −1, 3, 18, 25, 31, 39, 46, 60, 86, 96], I2 = [−5, −4], |
| | I15 = [3, 4], I11 = [7, 8], I14 = [9, 10], I12 = [24, 25], I14 = [26, 27], I11 = [34, 35], I15 = [40, 41], I5 = |
| | [43, 44], I1 = [45, 46], I15 = [49, 50], I10 = [50, 51], I1 = [65, 66], I1 = [97, 98], L1 = [89~90], L2 = [−54~−53, −26~−25, 56~57, 71~72, 77~78], |
| | L3 = [15~17, 93~95], L4 = [79~80], L14 = [29~30], L15 = [67~68] |
| Struc1484 | M = [−83, −73, −71, −53, −43, −39, −36, −31, −17, 0, 33, 48, 60, 70], W = [−86, −60, −59, −50, −41, −27, −25, −22, −3, 23, 40, 41, 46, 50, 55, 75], D = [9], |
| | I1 = [11, 12], I1 = [39, 40], L2 = [2~3, 67~68, 82~83], L3 = [−48~−46, −24~−24, −9~−7] |
| Struc1485 | M = [−50, −23, −13, 0, 2, 8, 22, 38, 41, 50, 58, 64, 83, 93], W = [−38, −5, 32, 84, 87, 88, 90, 91, 95, 96], I1 = [−26, −25], L3 = [74~16], L4 = [−33~−30] |
| Struc1486 | M = [−95, −92, −86, −82, −75, −60, −53, 0, 9], W = [−72, −58, −28, −27, 6, 10, 16, 17, 18], L2 = [−67~−66, −50~−49, −42~−41, −38~−37, −32~−31], L3 = [−35~−35] |
| Struc1487 | M = [−83, −74, −60, −7, 17], W = [−84, −67, −20, 18, 21], D = [−37, −36], L3 = [−52~−50, −11~−11] |
| Struc1488 | M = [−98, −76, −71, −46, −36, −11, 15, 20, 24, 47, 56, 65, 76, 89, 93], W = [−61, −53, −35, 9, 18, 23, 58, 77, 78], L2 = [−59~−58, −30~−29, 1~2, 7~8], L3 = [37~39] |
| Struc1489 | M = [−51, −45, −6, 0, 2, 10, 16, 41, 51, 54, 76, 85, 98], W = [−26, −15, 26, 36, 71, 88, 95, 96, 97, 99], D = [−18], L1 = [28~32], L2 = [−40~−37 −23~−22] |
| Struc1490 | M = [−60, −44, −23, −19, 0], W = [−98, −86, −46, −45, −6, 3], I2 = [−38, −37], L2 = [−32~−31, 17~18], L3 = [−52~−50] |
| Struc1491 | M = [−94, −58, −47, −39, −36, −29, 67, 74, 84, 93], W = [−83, −79, −78, −35, −30, −15, −14, −5, 10, 48, 50, 51, 62, 96, 100], D = [−21], I1 = [−18, −17], I4 = [99, 100], |
| | L2 = [−76~−75, −71~−70, −3~−2], L3 = [96~97], L4 = [33~36] |
| Struc1492 | M = [−41, 3, 14, 21, 65, 74, 89, 92], W = [−58, −39, 15, 17, 57, 63, 66, 76, 90, 93], D = [−19], I1 = [−59, −58], I1 = [−17, −16], L3 = [−52~−51, −30~−28], L6 = [33~38] |
| Struc1493 | M = [−90, −83, −80, −17, −66, −56, −9, 8, 17, 24, 40, 46, 57, 60, 71, 96], W = [−73, −71, −53, −29, −15, −14, −11, 7, 35, 43, 48, 67, 79, 80, 91], D = [−96], |
| | I3 = [30, 31], I1 = [55, 56], L2 = [−63~−62, −37~−36], L4 = [87~90] |
| Struc1494 | M = [−71, −50, −36, −8, 12], W = [−83, −81, −79, −54, −51, −37, −13, 10], D = [−86, −85], I1 = [−66, −65], L2 = [−25~−22], L3 = [−46~−44], L4 = [−94~−93], L5 = [−31~−25] |
| Struc1495 | M = [−94, −86, −81, −62, −53, −41, −32, −27, 15, 20, 63, 69, 13, 15], W = [−80, −77, −76, −46, −37, −36, −29, −15, −14, −5, 19, 48, 56, 87, 88], D = [34, 35, 36, 37, 38], |
| | L1 = [4~6], L2 = [98~99], L3 = [9~10], L4 = [−72~−69] |
| Struc1496 | M = [−92, −46, −42, −25, 24, 29, 37], W = [−94, −80, −18, −69, −52, −51, −43, −36, −33, −20, −6, 5, 14, 31, 32], D = [−89, −88, −63, −62, −61, −39], I2 = [−5, −4], |
| | L3 = [−75~−73], L4 = [−32~−30], L5 = [−7~−7] |
| Struc1497 | M = [35, 44, 46, 67, 85, 89], W = [−15, −14, −8, 2, 29, 30, 33, 50, 79, 80, 82, 83, 91], I2 = [42, 43], I15 = [98, 99], L2 = [−11~−10, 38~39, 73~74], L3 = [6~8], |
| | L5 = [57~61] |
| Struc1498 | M = [2, 18, 48, 59, 73, 85], W = [−90, −70, −69, −43, −28, −27, −15, −7, −6, 10, 21, 22, 54, 75, 80, 95, 97], |
| | D = [−89, −85, −87, −86, −85, −84, −83, −82, −81, −80, −79, −78, −77, −76, −75, −68, −67, −66, −10], I1 = [−14, −13], I1 = [69, 70], I1 = [99, 100], |
| | L1 = [−60~−47, 63~64], L2 = [7~8, 32~33, 56~57], L3 = [89~91], L4 = [−39~−36], L5 = [39~43] |
| Struc1499 | M = [−31, −29, −15, 0, 10, 52, 97], W = [−28, 3, 7, 8, 33, 37, 39, 40, 50, 96], D = [−37, −36, 94, 95], I1 = [−18, −17], I1 = [44, 45], L3 = [−25~−23, 90~91], L4 = [15~18] |
| Struc1500 | M = [−85, −81, −64, −56, −39, −35, −29, −15, −2, 8, 43, 70, 83, 96], W = [−98, −74, −70, −57, −53, 15, 21, 34, 76, 80, 82], D = [50], L2 = [5~6, 32~33, 52~53], L3 = [16~18] |
| Struc1501 | M = [−58, −46, −42, −31, −8, −6, 0, 8, 15, 31, 54], W = [−55, −53, −47, −38, −26, −15, −14, 5, 13, 17, 43, 48, 65, 18, 84, 91, 100], D = [71, 72, 73, 74, 75, 79, 80, 81], |
| | I1 = [56, 57], L2 = [92~93, 98~99], L3 = [62~64], L7 = [35~41] |
| Struc1502 | M = [−93, −83, −78, −76, −25, −12, 0, 28, 32, 76, 86], W = [−60, −42, −33, −29, 3, 25, 42, 47, 59, 65, 66, 67, 72], D = [94], I11 = [−40, −39], L2 = [−9~−8, 89~90], |
| | L3 = [−20~−18] |
| Struc1503 | M = [−80, −70, −67, −60, −14, −10, 18], W = [−72, −23, −6, 2, 11], I2 = [−38, −37], L3 = [−52~−50] |
| Struc1504 | M = [−59, −47, −25, 0, 13, 22, 36, 53, 80], W = [−84, −72, −71, −60, −34, −33, −28, −18, −8, −7, 3, 4, 9, 10, 17, 26, 39, 40, 47, 52, 55, 56], D = [−54], I1 = [−90, −89], |
| | I1 = [43, 44], L9 = [64~73], L2 = [19~20] |
| Struc1505 | M = [−78, −59, −54, −46, −14, 21, 31, 76, 93], W = [−88, −83, −61, −35, −34, −27, 36, 58], L2 = [−29~−28, 46~47, 64~65], L4 = [37~39], L6 = [12~17] |
| Struc1506 | M = [−94, −85, −68, −63, −58, −54, −44, 5, 15, 18], W = [−72, −45, −38, −28, −27], L3 = [−37~−35] |
| Struc1507 | M = [−61, −30, −20, 41, 67, 89], W = [−90, −74, −40, −35, −12, 79, 80], D = [−92, 21], I11 = [−38, −37], I15 = [−37, −36], I12 = [−32, −31], I1 = [17, 18], I1 = [61, 62], |
| | L3 = [6~8, 32~34], L5 = [−80~−76] |
| Struc1508 | M = [−15, 0, 10, 16, 28, 32, 42, 47, 50, 52, 86, 91, 97], W = [−39, −28, 7, 37, 39, 40, 72, 84, 95, 96], I2 = [−37, −36] |
| Struc1509 | M = [−67, −65, −60, −50, 8], W = [−83, −38, −31, −27, −24, 16, 22], I2 = [−38, −37], I3 = [−28, −27] |
| Struc1510 | M = [−83, −20, 46, 60, 73, 78, 97], W = [−91, −75, −71, −68, −55, −33, −26, −21, −18, −11, −9, 25, 26, 55, 67, 89, 94], D = [−89, −88, −87, 6, 32, 33, 34, 35, 88], |
| | I2 = [−60, −59], I12 = [−58, −57], I6 = [−54, −53], I1 = [−51, −50], I14 = [−47, −46], I15 = [−43, −42], |
| | I13 = [−42, −41], I10 = [−38, −37], I1 = [−35, −34], L8 = [−67~−63], L1 = [−79~−77], L2 = [−96~−96, −94~−93, −28~−27], L5 = [41~42] |
| Struc1511 | M = [−51, −49, −43, −40, −30, −18, 11, 76, 96], W = [−55, −41, −19, −17, 9, 10, 21, 22, 23, 51], |
| | D = [−88, −87, −86, −85, −84, −83, −82, −81, −80, −79, −78, −77, −76, −75, −69, −68, −64, −63, −62, −61, −60, −59, −58, −57, −56, 89, 90], I9 = [66, 67], |
| | L2 = [−10~−5], L3 = [15~17] |
| Struc1512 | M = [−89, −84, −74, 16, 22], W = [−76, −72, −56, −53, 2, 17], I1 = [−27, −26], L1 = [−40~−38], L2 = [−31~−30, −10~−9] |
| Struc1513 | M = [−33, −2, 15, 26, 44, 73, 84], W = [−80, −20, 5, 19, 21, 49, 51, 53, 63, 83, 93], D = [−87], I3 = [−49, −48], I7 = [−43, −42], I14 = [−41, −40], |
| | L2 = [−58~−57, −14~−13], L3 = [−83~−82, 6~8, 33~38, 66~66, 75~78], L4 = [−29~−26, 58~61], L5 = [−74~−71], L6 = [−52~−52] |
| Struc1514 | M = [−97, −88, −62, −57, 0, 9, 17], W = [−94, −86, −74, −40, −26, −15, −14, −9, 32], I7 = [−50, −49], L1 = [4~5], L2 = [29~30], L3 = [−8~−6], L5 = [−32~−29] |
| Struc1515 | M = [−87, −74, −46, −42, −35, −25, 0, 20, 29, 43, 47, 51], W = [−91, −78, −68, −67, −53, −52, −51, −36, −6, 5, 23], D = [−64, −63, −62], I1 = [−93, −92], |
| | L2 = [−31~−30, 37−38], L7 = [−7~−7] |
| Struc1516 | M = [−52, −46, −28, −19, −15, 8, 26, 58, 68, 76, 80, 96], W = [−49, −36, −4, −2, 5, 21, 57, 66, 86], L2 = [−57~−56, 17~18, 49~50] |
| Struc1517 | M = [−82, −53, −50, −22, −12, 5], W = [16, 17], L2 = [−32~−31] |
| Struc1518 | M = [−94, −78, −69, −64, −61, −52, −25, 0, 12], W = [−99, −97, −93, −91, −66, −59, −56, −42, −34, −33, −28, −18, −16, −15, 9, 17, 57], D = [6], I1 = [3, 4], |
| | I3 = [9, 10], I6 = [17, 18], I6 = [20, 21], I5 = [24, 25], I3 = [31, 32], I2 = [45, 46], I14 = [54, 55], |
| | L2 = [34~35, 38~39], L3 = [−9~−7, 40~42, 49~51], L4 = [−40~−37, 58~59], L5 = [74~78], L12 = [60~70] |
| Struc1519 | M = [−86, −80, −72, −68, −64, −55, −37, −23], W = [−94, −75, −74, −44, −32, −31, −28, 3, 21], L1 = [−41~−39], L2 = [−2~−1], L3 = [−8~−6], L4 = [−95~−95] |
| Struc1520 | M = [−90, −82, −78, −75, −68, −55, −50, −47, −38, −31, −26, −23, 5, 13, 21], W = [−80, −14, −72, −51, −46, −43, −37, −36, 6, 15], D = [−94], L2 = [16~17], |
| | L3 = [−61~−59, −13~−11] |
| Struc1521 | M = [−78, −58, −36, 73, 77, 79], W = [−95, −79, −17, −62, −47, −46, −33, −15, −14, −2, 9, 21, 42, 60, 74, 95], D = [−49, 50, 90, 91], I1 = [−51, −50], I8 = [32, 33], |
| | L2 = [−85~−84, −54~−53, 7~8, 17~18, 54~55, 98~99], L3 = [−41~−39, 67~69] |
| Struc1522 | M = [−74, −46, −35, −28, 0, 24, 29, 37, 42], W = [−94, −93, −91, −78, −68, −52, −51, −49, −43, −36, −27, −22, −7, 5, 15], D = [−89, −88, −63, −62, −61], I6 = [−8, −7], |
| | L2 = [−31~−30] |
| Struc1523 | M = [−90, −58, −39, −36, −2, 5, 43, 67, 69, 74, 84, 95], W = [−70, −62, −54, −38, −14, −12, 4, 46, 51, 62, 76, 80, 81, 98], L4 = [−80~−77], L5 = [24~28] |
| Struc1524 | M = [−25, −23, −15, −7, −5, 50, 57, 78, 83], W = [−20, −10, 26, 95, 99], D = [92], I1 = [14, 15], I3 = [26, 27], L1 = [32~33, 36~38], L4 = [87~89] |
| Struc1525 | M = [−94, −75, −63, −58, −54, −23, 1, 17, 22], W = [−80, −60, −45, −11, 16], L2 = [5~6], L3 = [−85~−83, −37~−35] |
| Struc1526 | M = [−93, −66, −60, −36, −28, −26, 0, 3], W = [−98, −92, −57, −46, −37, 6], D = [−81, 12], I2 = [−39, −38], L2 = [−50~−49, −43~−42, 16~17] |
| Struc1527 | M = [−95, −76, −73, −69, −48, −45, −35, −31], W = [−96, −86, −81, −55, −54, −39, −37, −36, −27, −10, −9, −6, −4, 5, 6, 8], D = [3, 4], L1 = [−64~−63] |
| Struc1528 | M = [−85, −78, −76, −71, −63, −59, −48, −13, −5, 0, 15], W = [−95, −94, −92, −89, −83, −58, −57, −52, −47, −42, −27, −10, 6, 51], D = [32, 37, 38], I1 = [−36, −35], |
| | L1 = [−32~−31], L2 = [47~48], L3 = [−46~−44, −9~−7, 25~26] |
| Struc1529 | M = [−81, −78, −76, −56, −52, 1, 43, 45, 50], W = [−98, −70, −62, −57, −53, −37, −14, −9, −7, 80, 97], D = [18, 19, 20], I1 = [9, 10], L1 = [−11~−10], |
| | L2 = [−36~−35, 32~33, 69~70, 81~82, 95~96], L4 = [4~6] |
| Struc1530 | M = [−92, −67, −49, −28, −11, 5, 12, 16], W = [−93, −55, −54, −39, 4], L2 = [−44~−43, −32~−31], L3 = [−86~−84] |
| Struc1531 | M = [−55, −51, −47, −36, −13, 19, 24, 41, 64, 68], W = [−38, −30, 16, 25, 35, 50, 51, 57, 66, 72, 81, 86, 91, 95], D = [−22, 82, 83, 84, 85], I1 = [−43, −42], |
| | I1 = [−19, −18], L1 = [74~77], L2 = [37~38], L3 = [29~31], L7 = [2~8] |
| Struc1532 | M = [−79, 0, 5, 25, 33, 36, 49, 58, 64, 81, 85, 98], W = [−88, −87, −82, −80, −78, −71, −57, −43, −17, −16, −15, −14, −8, 2, 32, 48, 57, 68, 70, 71, 87, 90], |
| | D = [23], I4 = [−58, −57], I15 = [−56, −55], I2 = [18, 19], I1 = [93, 94], L1 = [11~13], |
| | L2 = [−73~−72, −46~−45, 7~8], L12 = [−83~−83] |
| Struc1533 | M = [−93, −85, −68, −35, −20, −7, −4, 15, 21, 35, 38, 49], W = [−97, −91, −86, −79, −76, −61, −60, −49, −48, −28, −13, −3, −1, 12, 45], D = [29, 30, 43], L11 = [55~65], |
| | L1 = [−27~−25], L3 = [−90~−88, 23~24] |
| Struc1534 | M = [−89, −86, −81, 79, −6, −55, −52, 0, 15], W = [−96, −92, −83, −54, −38, −32, −27, −14, −11, 23, 32], L2 = [−8~−7, 37~38] |
| Struc1535 | M = [−88, −82, −53, −50, −33, −28, −22, −10, 15, 21], W = [−36, 4], D = [−77, −76, −75, −74, −73, −72, −71, −70, −69, −68, −67, −66, −55, −64, −63], I2 = [−38, −37], |
| | L3 = [−60~−58] |
| Struc1536 | M = [−68, −66, −63, −44, 4], W = [−74, −59, −45, −33, −28, −23, −8, 5, 6, 21, 22], I8 = [−74, −73], L1 = [−97~−94], L2 = [−87~−86, −32~−31, −27~−26, 17~18] |
| Struc1537 | M = [−90, −57, −43, −39, −33, 0, 18, 52, 54, 59, 63, 71, 87], W = [−61, −56, −47, −46, 9, 70, 84, 94], D = [−53, −13, 34, 35, 36], I1 = [−61, −60], I2 = [3, 4], |
| | I1 = [26, 27], L1 = [5~8, 44~45], L2 = [−26~−25, 76~77], L3 = [−78~−76, −72~−70, −10~−9] |
| Struc1538 | M = [−30, 5, 47, 89, 96], W = [−47, −17, 9, 15, 51, 52, 70, 78], D = [−46, −45, −44, −43, −42, −41, 32, 33], I3 = [38, 39], I9 = [70, 71], L1 = [−84~−74, −20~−18], |
| | L2 = [−10~−5] |
| Struc1539 | M = [−71, −60, −53, −9, 0, 15, 18, 37, 48, 53], W = [−59, −57, −17, −11, −8, 2, 16, 19, 38], D = [−93, 21, 22, 23, 24, 25, 26], I1 = [−91, −90], L1 = [64~67], |
| | L4 = [69~72], L6 = [−41~−36, 57~61] |
| Struc1540 | M = [−45, −35, −27, −9, −6, 26, 34, 37, 42, 70, 82], W = [−56, −52, −44, −32, −30, 13, 33, 35, 44, 45, 63, 68, 76, 77, 88, 100], D = [−17, 74], I4 = [−85, −84], |
| | I1 = [−22, −21], I9 = [62, 63], I2 = [68, 69], L1 = [−81~−78], L2 = [−88~−87, 78~79], L3 = [−2~0], L4 = [−94~−94, −51~−48] |
| Struc1541 | M = [−57, −40, −28, 7, 23, 26, 50, 76, 96], W = [−49, −36, −14, −11, 5, 6, 9, 57, 81, 86], I1 = [−37, −36], I5 = [43, 44], L2 = [−47~−46, −13~−12] |
| Struc1542 | M = [−77, −47, −43, −8, 0, 18, 21, 25, 54, 63, 67, 76, 82, 86, 99], W = [−83, −55, −45, −36, −12, −9, −5, 3, 14, 15, 36, 53, 72, 73, 75, 100], D = [−53, −51], |
| | I9 = [−60, −59], I6 = [34, 35], I2 = [77, 78], I2 = [91, 92], L1 = [−17~−14], L4 = [−39~−38, 7~9] |
| Struc1543 | M = [−83, −73, −65, −52, −29, −7, 5], W = [−90, −84, −26, −25, 22], I6 = [−94, −93], I8 = [9, 10], I1 = [17, 18], L1 = [−39~−37], L3 = [−11~−11], L4 = [12~13] |
| Struc1544 | M = [−97, −88, −71, −69, −64, −26, −13, 0, 9], W = [−96, −84, −83, −82, −81, −48, −14, −9, 14, 24, 25], D = [−30], I6 = [−58, −57], I3 = [−33, −32], I1 = [37, 38], |
| | L2 = [−54~−54, 4~6], L3 = [−8~−6, 17~19] |
| Struc1545 | M = [−58, −53, −47, −36, −27, −14, 18, 34, 37, 41, 48, 57, 77, 82], W = [−1, 5, 6, 21, 22], I1 = [31, 32], L1 = [93~95], L2 = [−39~−38, 8~9, 72~73] |
| Struc1546 | M = [−78, −76, −52, −46, −24, −22, −13, 1], W = [−71, −37, −28, −15, 5, 8, 19, 21, 2, 32, 40, 54, 77], D = [6, 7, 79], I1 = [−54, −53], I2 = [9, 10], I6 = [26, 27], |
| | I5 = [39, 40], I15 = [47, 48], I1 = [48, 49], I5 = [54, 55], I3 = [56, 57], I9 = [84, 85], |
| | I1 = [88, 89], L2 = [17~18, 91~92], L3 = [43~24, 63~65], L4 = [69~70], L7 = [32~33, 73~75] |
| Struc1547 | M = [−60, −31, −8, −1, 3, 14], W = [−78, −72, −39, 11, 16, 18, 22], D = [−88, −87, −67], I1 = [−55, −64], I2 = [−40, −39], L2 = [−02~−82, −43~−42, −23~−22, 5~6], |
| | L3 = [−52~−50] |
| Struc1548 | M = [−89, −82, −76, −54, −45, −40, −38, −34, −24, −17, 49, 53, 65, 70, 94, 99], W = [−94, −93, −77, −61, −53, −25, −12, −8, 3, 23, 34, 39, 42, 45, 60, 67, 68, 73, |
| | 74, 93], D = [−66, −64], I10 = [−70, −69], I1 = [1, 2], I3 = [10, 11], |
| | I1 = [89, 90], L2 = [−46~−47, −7~−6], L4 = [83~87], L5 = [29~33] |
| Struc1549 | M = [−52, −31, −9, 1, 4], W = [−78, −61, −60, −55, −54, −47, −45, −33, −23, −22, −8, 5, 6, 21], I4 = [−65, −64], I5 = [−59, −58], L1 = [−97~−94], L2 = [−87~−86], |
| | L3 = [−72~−69] |
| Struc1550 | M = [−96, −88, −69, −53, −24, −20, −14, 7, 11, 21, 25], W = [−85, −75, −67, −59, −39, −34, −28, −18, 9, 12, 20, 38, 48], D = [−33, −32, −31], I1 = [4, 5], I2 = [43, 44], |
| | I4 = [52, 53], L2 = [−63~−62, 0~2], L4 = [−9~−6] |
| Struc1551 | M = [−76, −53, −38, −14, 18, 41, 57, 60, 67], W = [−15, −2, 5, 21, 65], D = [94, 95], I14 = [30, 31], L2 = [72~73], L3 = [80~82] |
| Struc1552 | M = [−69, −47, −44, −40, −37, −30, −23, 45, 81, 89], W = [−98, −91, −71, −65, −9, −6, 3, 7, 10, 27, 28, 37, 40, 57, 69, 70, 86], I1 = [59, 60], L1 = [−54~−52], |
| | L2 = [−61~−60, −19~−18, 13~14, 25~26, 78~79], L3 = [34~36] |
| Struc1553 | M = [−85, −76, −62, −55, −50, −22, 1], W = [−98, −51, 19, 21, 22], D = [−37, −36, −35, −34], I1 = [−66, −65], I4 = [−27, −26], L2 = [−13~−12], L3 = [−46~−44, 4~6], |
| | L5 = [−94~−93] |
| Struc1554 | M = [−51, 5, 17, 76], W = [−42, −41, −19, −17, 9, 15, 18, 21, 22, 97], D = [−71, −69, −68, −67, −65, −65, −64, −63, −62, −61, −60, −59, −58, −57, −56, −55, −33, |
| | 88, 89], I9 = [63, 64], L1 = [−83~−74], L3 = [−30~−29], L6 = [−10~−2] |
| Struc1555 | M = [−94, −78, −30, 1, 17, 22, 42, 68, 71, 81, 84, 95], W = [−64, −47, −37, −33, −10, −8, −5, 52, 54], D = [31, 32, 33, 51, 98, 99], L2 = [−71~−70], L3 = [8~10] |
| Struc1556 | M = [−94, −90, −86, −82, −38, −28, −11, 5], W = [−84, −83, −74, −68, −51, −45, −43, 6], L2 = [−55~−54], L3 = [−61~−59] |
| Struc1557 | M = [−33, −12, −10, −6, 14, 25, 4], W = [−87, −65, −49, −45, −31, −27, −20, −17, 7, 12, 19, 21, 36, 39, 47, 87], D = [−58, −57, −56, 32, 33], I3 = [−53, −52], |
| | I1 = [−29, −28], L8 = [−84~−77], L1 = [−25~−24, 71~81], |
| | L2 = [−63~−62, −44~−43, −1~0, 5~6], L3 = [−90~−88, −16~−15, 36~37, 58~63, 89~91] |
| Struc1558 | M = [−95, −71, −62, −58, −40, −36, 8, 22, 27, 60, 67, 69, 80, 85], W = [−94, −52, −45, −37, −32, −28, −27, −15, −12, −2, 7, 18, 33, 49, 50, 55, 68, 87, 96, 99], |
| | D = [−76, −75], I1 = [−32, −31], I1 = [95, 96], L2 = [−54~−53, −1~0, 33~34, 57~58, 90~91, 97~98], |
| | L3 = [39~41], L5 = [−82~−80] |
| Struc1559 | M = [−85, −51, −35, −31, −27, −22, −14, 4, 6, 12, 61], W = [−79, −32, −28, −10, −1, 21, 33, 64, 70, 72, 73, 77, 79], D = [−77], I3 = [14, 15], I13 = [17, 18], |
| | I14 = [20, 21], I15 = [24, 25], I15 = [26, 27], I2 = [40, 41], I6 = [42, 43], I7 = [46, 47], I3 = [48, 49], |
| | I12 = [53, 54], I2 = [56, 57], I12 = [69, 70], I10 = [71, 72], L1 = [29~30], L2 = [−91~−90, −65~−64, −20~−19], L4 = [64~67], L7 = [82~86], L9 = [35~37], L11 = [92~98] |
| Struc1560 | M = [−76, −70, −41, −38, 20, 34, 41, 72], W = [−83, −81, −73, −43, −15, −8, 15, 16, 19, 32, 33, 38, 50, 65, 80], D = [−52, 11, 81, 82], I3 = [75, 76], L1 = [68~70], |
| | L2 = [−10~−9, 0~1], L3 = [6~8, 45~47, 51~54], L4 = [98~99], L5 = [−79~−79], L7 = [24~25], |
| | L8 = [58~61, 87~96], L9 = [−59~−55] |
| Struc1561 | M = [−2, 14, 39, 89, 95], W = [−98, −91, −71, −17, −9, 3, 10, 40, 56, 69, 70, 83, 86], D = [−79, −78, 7], I1 = [59, 60], L2 = [−88~−87, −61~−60, −38~−37, 25~26, 33~34, 78~79], |
| | L3 = [−47~−45, 45~47] |
| Struc1562 | M = [−84, −80, −67, −60, −50, −41, −10, −6, 9, 16], W = [−86, −72, −71, −57, −21, −1, 2, 11], I2 = [−38, −37], I9 = [−33, −32], I15 = [−31, −30], I1 = [−23, −22], |
| | I7 = [−20, −19], I4 = [−17, −16], I14 = [−14, −13], L2 = [5~6, 12~13], L10 = [−28~−27], |
| | L3 = [0~1], L5 = [21~22] |
| Struc1563 | M = [−68, −63, −54, −44, −38, −34, −26, −23, −17, −13], W = [−66, −64, −55, −50, −41, −16, 13, 17, 20, 23], D = [26], I1 = [−1, 0], I6 = [16, 17], L1 = [3~4], |
| | L2 = [−31~−30, 21~22], L3 = [−61~−59], L6 = [34~35] |
| Struc1564 | M = [−30, 4, 22, 71, 94], W = [−39, −38, −28, 16, 31, 32, 52, 59, 96], D = [−3, 85], I1 = [−1, 0] |
| Struc1565 | M = [−72, −66, −54, −41, −17, −12, 20, 53, 92], W = [−78, −69, −57, −56, −19, −18, −14, −11, 7, 11, 17, 32, 50, 79, 87, 94, 95], I3 = [43, 44], I1 = [87, 88], |
| | L2 = [−49~−48, 5~6, 33~36, 65~70], L3 = [−76~−75, −1~1], L4 = [80~84], L6 = [−34~−34] |
| Struc1566 | M = [−76, −70, −61, −44, −32, −28, 0], W = [−74, −56, −50, −19, −18, 25, 29, 30, 46], D = [−21, −16, −15], I1 = [−25, −24], I3 = [44, 45], L2 = [12~13], L3 = [20~22] |
| Struc1567 | M = [−74, −55, −50, −46, 20, 23, 27], W = [−94, −82, −81, −76, −73, −72, −66, −64, 2, 29], D = [−37, −36, −35, −34, 12], I1 = [−41, −40], I1 = [−8, −7], L2 = [−1~0], |
| | L4 = [−30~−30] |
| Struc1568 | M = [−55, −34, 0, 6, 12, 56, 66, 70, 84, 87, 89, 94], W = [−52, −40, 21, 22, 36, 55, 78, 86, 88], I1 = [−61, −60], I4 = [−51, −50], I13 = [−18, −17], I12 = [−15, −14], |
| | I15 = [34, 35], I15 = [36, 37], I7 = [37, 38], L2 = [−39~−38, 60~61], L3 = [−47~−42] |
| Struc1569 | M = [−53, −46, −43, −34, −10, 0, 36, 44, 61, 88, 95], W = [−69, −70, −65, −64, −61, −47, −27, −15, −13, −9, −7, 21, 35, 42, 47, 57, 58, 86], I3 = [−85, −84], |
| | I8 = [−15, −14], I13 = [72, 73], L1 = [66~67], L2 = [6~7] |
| Struc1570 | M = [−80, −50, −43, −12, 6, 31, 39, 43, 53, 87], W = [−83, −73, −38, 17, 20, 22, 40, 55, 88, 95, 96, 97], D = [−61, 14], I1 = [18, 19], L2 = [−35~−34, −1~0, 20~21] |
| Struc1571 | M = [−94, −76, −72, −66, −49, 12, 21], W = [−95, −93, −63, −62, −50, −32, −30, −26, 5], D = [−41], I3 = [−31, −30], I2 = [8, 9], L1 = [−38~−36], |
| | L2 = [−82~−81, −1~0, 25~27], L3 = [−57~−55, 16~17] |
| Struc1572 | M = [−77, −33, 5], W = [−88, −66, −23], I6 = [−67, −66], I15 = [−38, −37], I2 = [18, 19], L11 = [−39~−39], L2 = [−31~−30, −1~0, 7~8], L3 = [−87~−87, 24~25], |
| | L6 = [−96~−95] |
| Struc1573 | M = [−93, −82, −63, −58, −43, −39, −23, −15, 0, 7, 12], W = [−94, −60, −40, −26, −3], L1 = [−10~−9], L3 = [−33~−31] |
| Struc1574 | M = [−94, −90, −57, −52, −25, 6, 21, 39, 57], W = [−95, −67, −60, −38, −17, 5], L1 = [−37~−36], L2 = [−1~0, 15~16] |
| Struc1575 | M = [−47, −42, −1, 4, 65, 70, 82, 87, 94, 96], W = [−40, 21, 22, 29, 30, 34, 35, 47, 48, 55, 55, 83, 88, 97], I13 = [−18, −17], I12 = [−17, −16], I15 = [34, 35], |
| | I15 = [35, 35], I8 = [37, 38], L8 = [−53~−53], L2 = [−11~−10], L3 = [−59~−57], L4 = [58~61] |
| Struc1576 | M = [−85, −39, 37], W = [−83, −70, −34, −30, −7, 6], I8 = [−69, −68], I1 = [−27, −26], L2 = [−72~−71, −56~−55, 0~1, 43~44], L3 = [30~32], L4 = [22~24], L7 = [−25~−24] |
| Struc1577 | M = [−97, −1, 1, 20, 44, 92, 99], W = [−71, −49, −18, −17, −11, −10, 25, 42, 53, 81, 84, 96], L2 = [50~51, 57~58], L3 = [−89~−86, −43~−41, 78~80], L4 = [33~36] |
| Struc1578 | M = [−61, −49, −19, 2], W = [−85, −82, −69, −68, −43, −38, −23, −18, −13, −9, −7, 35, 44, 55, 56, 57, 58, 61], D = [48, 49], I12 = [−82, −81], I1 = [−64, −63], |
| | I1 = [30, 31], I2 = [42, 43], L8 = [−74~−71], L1 = [26~27], L2 = [−37~−36, −31~−30], L4 = [8~11] |
| Struc1579 | M = [−79, −72, −48, −44, −42, −33, −12, 45], W = [−97, −93, −92, −67, −58, −52, −41, −37, −29, −24, −18, 5, 6, 10, 13, 14, 15, 37, 38, 46], D = [−51, −50, 51], |
| | I1 = [−98, −97], L2 = [−87~−86, −36~−35, −1~0, 29~30], L4 = [−57~−56] |
| Struc1580 | M = [−86, −63, −58, −46, −31, −24, −11, 32], W = [−89, −84, −79, −65, −28, 38, 45, 46, 49, 59], D = [−27], I4 = [−54, −53], I1 = [−21, −20], L2 = [−35~−34, −1~0, 43~44], |
| | L3 = [−76~−75, 5~7], L4 = [50~51] |
| Struc1581 | M = [−45, −42, −5, 19, 70, 81, 87, 89, 94], W = [−67, −40, 21, 22, 37, 47, 48, 55, 56, 88], I3 = [−15, −14], I15 = [−13, −12], I7 = [−10, −9], I15 = [35, 36], |
| | I6 = [36, 37], I15 = [37, 38], L2 = [−56~−55, 50~61], L5 = [9~13] |
| Struc1582 | M = [−52, 33, 36, 50, 55, 78], W = [−48, −47, −31, −30, −9, 26, 32, 54, 65, 68, 77, 80, 87, 92], I1 = [−9, −8], I2 = [−6, −5], L1 = [23−24], L2 = [−40~−39, 7~8, 75~76], |
| | L3 = [−1~1] |
| Struc1583 | M = [−98, −57, −55, −49, −38, −33, −21, −7, −1, 12, 17, 21, 25, 29], W = [−52, −36, −31, −26], L2 = [−73~−72] |
| Struc1584 | M = [−76, −13, −6, −1, 25, 95], W = [−69, −68, −58, −38, −31, −28, −23, −18, −3, 3, 10, 24, 26, 29, 45, 61, 62, 84], D = [91], I1 = [55, 56], I1 = [71, 72], I1 = [88, 89], |
| | L2 = [−66~−65, −30~−29], L3 = [46~48], L4 = [−40~−40], L6 = [−44~−44] |
| Struc1585 | M = [−65, −57, −43, −34, −32, −28], W = [−82, −75, −74, −70, −60, −53, −41, −40, −31, −30, −25, −9, −8, 2, 9], D = [−68, −24, −23], I1 = [−74, −73], I1 = [−5, −4], |
| | L2 = [−96~−95, −1~0, 7~8], L6 = [−52~−47] |
| Struc1586 | M = [−17, 22, 40, 60, 99], W = [−7, −74, −67, −6, −63, −62, −12, −10, −2, 5, 6, 33, 34, 38, 43, 46, 49, 61, 62, 74, 81, 82, 84, 94], D = [−70, −69], |
| | L2 = [−76~−75, −65~−65, −33~−32, −25~−24, 29~30], L3 = [−50~−50], L4 = [−60~−60, −55~−55, 87~90], L5 = [−42~−38] |
| Struc1587 | M = [−62, −34, −18, −13, 18], W = [−99, −72, −71, −69, −3, 29, 30, 33], D = [−26, −25], L2 = [−48~−47, 31~32], L3 = [−40~−38], L5 = [−1~3] |
| Struc1588 | M = [−85, −57, −55, 1, 24, 32, 34], W = [−81, −73, −34, −18, −7, 6, 39, 53], I6 = [−69, −68], I6 = [−18, −17], I1 = [44, 45], L4 = [−72~−71] |
| Struc1589 | M = [−65, −60, −51, −30, 7, 25, 29, 51], W = [−89, −82, −69, −57, −56, −17, 10, 11, 32, 38], L2 = [−93~−92, −42~−41, −34~−33, −1~0, 45~46], L3 = [−26~−24], L4 = [−81~−77] |
| Struc1590 | M = [−50, −37, −16, 11, 19, 26, 76, 90], W = [−93, −62, −45, −28, −13, −7, −6, 10, 25, 33, 48, 68, 89, 91], D = [−77, −1, 31], I9 = [−87, −86], I1 = [−6, −5], |
| | L1 = [−68~−64], L2 = [57~58, 61~62], L3 = [33~35, 44~46], L4 = [−73~−72, −33~−30], L6 = [−81~−61] |
| Struc1591 | M = [−72, −18, −7, −5, 4, 26, 32, 41, 47, 50], W = [−99, −98, −96, −95, −71, −69, −67, −57, −33, −31, 3, 25, 38, 42, 46, 64, 89], I8 = [−96, −95], I1 = [61, 62], |
| | I1 = [72, 73], L1 = [57~58], L2 = [1~2], L3 = [−91~−91] |
| Struc1592 | M = [−80, −77, −38, −31, −28, −18, −2, 1, 7, 28], W = [−87, −85, −34, −32, −24, −20, −17, −16, −12, 6, 8, 27, 30, 43, 59, 66, 68], I1 = [−22, −21], I2 = [51, 52], |
| | L2 = [−93~−92, −57~−56] |
| Struc1593 | M = [−72, −54, −21, 16], W = [−88, −87, −86, −59, −58, −45, −41, −8, −7], D = [−25], I1 = [−49, −48], I9 = [12, 13], L1 = [5~8], L2 = [−78~−77, −47~−45] |
| Struc1594 | M = [−62, −57, −52, −49, −38, −7, −1, 44, 49, 59, 62, 65, 69, 97], W = [−86, −84, −83, −81, −78, −76, −74, −70, −69, −68, −64, −47, −41, −40, −13, −2, 32, 50, |
| | 71, 76, 86, 94], D = [81, 82], I2 = [−97, −96], I10 = [−67, −66], I2 = [84, 85], L9 = [−85~−85], |
| | L2 = [−80~−39, −73~−71, 5~6, 39~40], L4 = [−91~−90], L1 = [22~30] |
| Struc1595 | M = [−72, −56, −44, −36, −23, 4, 89, 92], W = [−63, −28, −24, −22, −17, 9, 21, 25, 30, 31, 60, 74, 95, 100], D = [−5, 48], I1 = [57, 58], L2 = [62~64], L3 = [−1~0] |
| Struc1596 | M = [−70, −64, −56, −49, −47, −29, −10, 7, 24, 27], W = [−85, −67, 12], L2 = [−96~−95, −32~−31, −1~0, 12~13] |
| Struc1597 | M = [−91, −77, −73, −51, −47, −40, −15, −10, 16, 47, 58, 90, 94], W = [−96, −95, −82, −68, −50, −45, −39, −20, −19, 2, 27, 36, 37, 48, 52, 57, 60, 63, 72, 91, 95, 99], |
| | D = [−25, −24, 8], I1 = [4, 5], L1 = [24~25], L2 = [−56~−55, −34~−33, 69~70, 84~85], L7 = [−6~0] |
| Struc1598 | M = [−43, −16, −6, −4, 25, 41, 54], W = [−99, −98, −72, −46, −39, −38, −37, −28, −26, −21, 2, 47, 57, 62, 100], D = [4, 5, 6, 7], I1 = [−63, −62], I1 = [71, 72], |
| | L2 = [−90~−89, −70~−67, −30~−29, −23~−22, −9~−8, 12~13, 96~97], L12 = [−80~−80] |
| Struc1599 | M = [−74, −55, −46, −41, −30, −26, −15, −10, 3, 14, 21], W = [−93, −88, −87, −73, −66, −53, −52, −22, −18, −9, −8, 28], I7 = [−93, −92], L2 = [32~33], L3 = [6~8], |
| | L15 = [−85~−85] |
| Struc1600 | M = [−55, −39, −25, 17, 22, 56, 92, 94, 99], W = [−75, −74, −71, −70, −64, −59, −2, 6, 33, 48, 49, 74, 81, 82, 84, 89, 97], I1 = [−72, −71], I9 = [−59, −58], |
| | I3 = [−20, −19], L1 = [1~5], L2 = [−68~−67, −50~−50, −33~−32, 39~40, 87~88], L3 = [−62~−61], L5 = [−3~−3] |
| Struc1601 | M = [−45, −13, 16, 33, 36, 44, 55, 79, 91], W = [−48, −47, −24, −42, −31, −30, −20, 17, 27, 43, 58, 68, 77, 78], D = [−34], L2 = [−39~−38, 21~22], L4 = [−2~1], |
| | L5 = [7~11, 93~97] |
| Struc1602 | M = [−87, −80, −67, −52, 61], W = [−47, −46, −45, −38, −30, −16, −14, −7, 4, 7, 8, 10, 26, 32, 35, 44, 46, 49, 52, 59], D = [−69], I1 = [−93, −92], |
| | I1 = [−65, −64], I10 = [−50, −49], I9 = [−47, −45], I15 = [−39, −38], I2 = [−36, −35], I13 = [−34, −33], |
| | I1 = [−22, −21], I1 = [−13, −12], I2 = [7, 8], I13 = [19, 20], I1 = [21, 22], I3 = [23, 24], I4 = [30, 31], I3 = [46, 47], I7 = [48, 49], I9 = [52, 53], |
| | I1 = [57, 58], L1 = [−19~−17, −1~2], L3 = [−41~−41, 37~38], L4 = [−8~−8], |
| | L7 = [14~15, 26~27], L8 = [33~34], L10 = [−28~−27] |
| Struc1603 | M = [−91, −77, −55, −51, −47, −43, −10, 7, 13, 16, 41, 72, 84], W = [−99, −96, −84, −82, −72, −68, −62, −46, −39, −27, −24, −23, −20, −19, −15, −11, 2, 27, |
| | 36, 37, 48, 49, 53, 63], D = [30, 90], L8 = [−7~0], L2 = [51~52], L3 = [−95~−93, −35~−33, 92~94] |
| Struc1604 | M = [−93, −78, −67, −65, −34, −25, −8, 23, 48, 60], W = [−83, −82, −76, −75, −48, 58, 70], I7 = [−48, −47], L2 = [−14~−73, −1~0, 12~13], L4 = [−62~−59, 31~34] |
| Struc1605 | M = [−72, −70, −27, −23, 7, 22, 31, 40, 58, 72, 82, 94], W = [−77, −76, −73, −69, −61, −7, 62], D = [−17, −16], L1 = [−21~−40], L2 = [−33~−32, 14~75], L4 = [−3~0] |
| Struc1606 | M = [−76, −42, −36, −28, −9, −7, 8], W = [−51, −49, −43, −35, −32, −25, −23, −19, −11, 13, 37], I5 = [−51, −50], I15 = [−50, −49], L1 = [−69~−66, 42~44], |
| | L2 = [−18~−17, 33~34], L3 = [38~39, 56~62], L5 = [−1~3] |
| Struc1607 | M = [−85, −80, −63, −58, −46, −34, −24, 0, 51, 55, 59], W = [−77, −76, −73, −45, −27, −7, 4, 8, 38], D = [43, 44], I1 = [−95, −94], I4 = [−54, −53], I2 = [4, 5], |
| | L2 = [12~13, 29~30], L3 = [−30~−28], L6 = [6~7] |
| Struc1608 | M = [−69, −38, −12, 0, 17, 20, 45], W = [−81, −78, −67, −50, −41, −37, −35, −24, −18, 5, 6, 8, 10, 13, 15, 43], D = [−31], I2 = [−81, −80], I1 = [−28, −27], |
| | L2 = [−87~−86, −75~−72, −44~−43, 29~30], L6 = [−57~−52] |
| Struc1609 | M = [−65, −32, −30, −26, −19, −16, −14, 10, 16, 20, 47, 63, 90], W = [−94, −93, −92, −91, −80, −61, −39, −38, −13, 3, 34, 38, 39, 46, 65, 73, 79, 80, 83, 89, 91, |
| | 94, 95], D = [−76, −75, 86], I1 = [21, 22], I10 = [58, 59], I2 = [64, 65], I13 = [79, 80], |
| | I9 = [94, 95], L2 = [−60~−59, 12~13, 24~26, 52~53, 96~97], L6 = [0~2], L7 = [49~50], L8 = [−72~−70], L9 = [68~71], L14 = [40~41] |
| Struc1610 | M = [−91, −86, −82, −78, −75, −50, −34, −26, −23, 0, 10, 15, 17, 48], W = [−87, −70, −68, −58, −49, −32, −18, −8, 9, 31, 35], I2 = [−99, −98], L1 = [−43~−40], |
| | L2 = [−14~−13, 22~23], L3 = [−71~−71, −67~−66], L5 = [−62~−62] |
| Struc1611 | M = [−95, 16, 23, 27], W = [−85, −83, −81, −72, −40, −37, 5, 13, 26, 38], I1 = [−49, −48], L2 = [−70~−67, −14~−13, −1~0], L3 = [−75~−75, −24~−23] |
| Struc1612 | M = [−88, −85, −42, −35, −6, −4, 15, 22, 47], W = [−93, −92, −70, −67, −48, −25, −18, 6, 9, 34, 45, 46], L2 = [−56~−55, −17~−16, −1~0], L5 = [−81~−7] |
| Struc1613 | M = [−81, −40, −29, −26, −23, −14, −6, 0], W = [−99, −97, −59, −88, −77, −61, −60, −35, −21, 9], D = [−86], I13 = [20, 21], L2 = [−75~−74, −65~−64, −59~−58, −49~−47] |
| Struc1614 | M = [−13, 6, 10, 21, 26, 36, 40, 45, 72, 77, 84], W = [8, 9, 13, 14, 16, 33, 48, 54, 55, 57, 59, 71, 78, 82], D = [−6, 60], L2 = [−40~−39, 52~53], L3 = [30~32] |
| Struc1615 | M = [−30, 13, 32, 39, 42, 63, 83], W = [3, 8, 25, 41, 76], D = [91], I2 = [−37, −36], L1 = [−63~−59], L2 = [−23~−22, 20~21], L3 = [−55~−47, 86~88] |
| Struc1616 | M = [−97, −85, −79, −74, −46, −44, −38, −23, −10, 8, 33, 39, 41, 57, 72], W = [−90, −88, −54, −47, −40, −16, 40, 66, 67, 68, 74], D = [23], I1 = [5, 6], I1 = [48, 49], |
| | I1 = [68, 69], L4 = [13~16] |
| Struc1617 | M = [−90, −52, −49, −5, 8, 11, 41, 50, 56, 62, 72], W = [−96, −92, −63, −50, −19, −8, −6, 4, 39, 47, 55, 69, 73, 92, 96], D = [−70, −28, 21, 84, 85], I1 = [−32, −31], |
| | I13 = [44, 45], L1 = [−62~−61], L2 = [−84~−83, −74~−74] |
| Struc1618 | M = [−89, −83, −7, 4, 67, 74, 85, 92, 94], W = [−99, −58, −36, −31, −27, 49, 59, 63, 79, 89, 90], I1 = [19, 20], L2 = [−64~−63, −4~−3, 25~26, 37~38, 50~61, 98~99] |
| Struc1619 | M = [−76, −68, −35, 12, 23, 44], W = [−86, −48, −47, −45, −44, 2, 4, 6, 7, 34, 38, 39, 51, 54, 72, 73], I2 = [60, 61], L2 = [−1~0], L3 = [30~32], L4 = [83~85], |
| | L7 = [−24~−18] |
| Struc1620 | M = [−17, −10, 0, 4, 58, 67, 72], W = [−13, −12, −8, 34, 44, 52, 71, 89, 90], I1 = [10, 11], I15 = [35, 36], I14 = [36, 37], I11 = [40, 41], I14 = [44, 45], |
| | I15 = [45, 46], L5 = [25~26] |
| Struc1621 | M = [−74, −30, −22, −6, 0, 7, 13, 20, 24, 42, 63, 85, 85], W = [−75, −73, −69, −68, −67, −66, −65, −60, −57, −53, −31, −24, −17, 3, 16, 41, 45, 64, 76, 83, 84], D = [−71], |
| | I1 = [−60, −59], I2 = [−36, −35], L2 = [−63~−62, −56~−55], L3 = [37~39], L6 = [−51~−47] |
| Struc1622 | M = [−7, 18, 27, 64, 77, 82], W = [−13, −12, −10, −8, 14, 15, 49, 59, 60, 69, 72], D = [33, 34, 35, 36, 43, 44, 87], I1 = [90, 91], L2 = [−1~0] |
| Struc1623 | M = [32, 42, 46, 51, 87, 92], W = [2, 15, 34, 35, 36, 52, 53, 54], D = [−13, −8, −7, 84], I3 = [−11, −10], L2 = [38~39, 75~76, 80~81], L4 = [18~21] |
| Struc1624 | M = [0, 2, 10, 28], W = [27, 31, 32, 33, 68], L2 = [90~91] |
| Struc1625 | M = [−8, 30, 32, 56, 62, 84, 86, 95], W = [−27, −26, 8, 37, 71, 80, 93], I9 = [−16, −15], I1 = [54, 55] |
| Struc1626 | M = [−9, −7, 20, 22, 51, 56, 60, 71], W = [−53, −51, −49, −47, −45, −36, −12, −10, −5, 4, 6, 10, 14, 18, 34, 55, 74, 83, 84, 93], D = [−44, −43, −42, −41, −40], |
| | I1 = [38, 39], I1 = [74, 75], I4 = [80, 81], L8 = [62~68], L9 = [−63~−55], L2 = [11~12, 91~92], L5 = [28~33] |
| Struc1627 | M = [−8, 31, 38, 65, 77, 94], W = [−21, −6, 16, 41, 49, 53, 60, 61, 72], I2 = [33, 34], I1 = [61, 62], L2 = [18~19, 35~36, 42~46, 54~55] |
| Struc1628 | M = [−4, 0, 7, 29], W = [−53, 16, 28, 56, 64, 92], D = [−19, 67, 68, 69, 70, 71, 72, 73, 74], I13 = [−48, −47], I15 = [23, 24], I2 = [34, 35], I3 = [36, 37], |
| | I1 = [48, 49], L1 = [44~45], L2 = [−37~−36, 26~27, 90~91], L3 = [−55~−55, 83~85], L6 = [−31~−28] |
| Struc1629 | M = [−94, −75, −70, −37, 0, 9, 33, 42, 91], W = [−90, −85, −84, −73, −50, −49, −48, −47, −19, −8, −3, 40, 41, 54, 55, 56, 69, 80, 82, 83, 92], I2 = [−49, −48], |
| | I1 = [−42, −41], L2 = [−59~−58, −17~−17], L3 = [−7~−6, 94~96] |
| Struc1630 | M = [−13, 19, 51, 54, 61, 75], W = [8, 21, 49, 83], I1 = [10, 11], I9 = [35, 36], L5 = [−10~−6] |
| Struc1631M | M = [0, 9, 16, 36, 44, 50, 83], W = [−17, −16, 28, 37, 59, 77, 81, 82], D = [6], I3 = [−8, −7], L2 = [32~33] |
| Struc1632M | M = [−31, −22, −8, 0, 2, 20, 28, 39, 50, 55, 85, 93, 96], W = [16, 24, 45, 73, 92], L1 = [−42~−41], L2 = [82~83], L5 = [41~43] |
| Struc1633M | M = [−14, −72, −3, 0, 10, 15, 22, 25, 52, 70, 91, 93], W = [−99, −92, −67, −63, −59, −49, −48, −41, −27, −11, −9, −8, 50, 83], D = [−51], I12 = [−98, −97], |
| | I11 = [−92, −91], I6 = [−64, −63], I6 = [−59, −58], I1 = [−44, −43], I13 = [−41, −40], I3 = [36, 37], L1 = |
| | [32~33], L2 = [−70~−69], L3 = [−37~−36], L4 = [−55~−55], L5 = [−45~−45], L6 = [−95~−95], L7 = [−80~−78, −23~−22], L9 = [−32~−32], L14 = [−87~−87] |
| Struc1634\|1 | M = [0, 17, 36, 47, 49, 75], W = [−24, −16, 7, 8, 37, 38, 71], D = [−9, 28], I15 = [−16, −15], I1 = [−6, −5], I6 = [30, 31], I2 = [64, 65], L1 = [55~57], |
| | L2 = [60~61, 93~94] |
| Struc1635M | M = [−78, −58, −53, −43, −21, −15, −1, 8, 18, 26, 71, 74, 79, 81], W = [−99, −98, −94, −93, −79, −77, −69, −59, −54, 4, 21, 56, 57, 59, 62, 78, 88], D = [94, 95], |
| | I1 = [40, 41], L8 = [33~34], L1 = [−36~−33], L2 = [−28~−27, 65~66, 89~90], I4 = [−39~−39] |
| Struc1636 | M = [−44, −42, −17, −12, −7, 0, 5, 22, 30, 40, 49, 53, 58, 71], W = [−55, −52, −38, −37, −26, −25, −10, −9, −4, 6, 9, 10, 35, 48, 64], D = [17, 18, 79], I1 = [15, 16], |
| | L2 = [−47~−46], L3 = [36~38] |
| Struc1637M | M = [−12, −7, 13, 28, 59, 65, 72, 75, 82], W = [−10, 10, 27, 87, 100], I1 = [93, 94], I5 = [95, 96], L2 = [−1~0, 19~20, 33~34, 36~37] |
| Struc1638 | M = [−56, −13, 26, 39, 57, 72, 92], W = [−57, −55, −50, −24, −22, −21, 6, 8, 10, 16, 34, 42, 47, 53, 71, 82], D = [−32, −23, 77, 78], I1 = [−28, −27], L9 = [16~17], |
| | L2 = [−37~−36, 0~1, 29~30], L7 = [−49~−43] |
| Struc1639 | M = [−43, −20, 0, 9, 35, 43, 52, 5, 69], W = [−95, −92, −90, −86, −74, −68, −49, −11, 37, 42, 70, 81, 86], D = [−46, −26], I1 = [−86, −85], I6 = [−84, −83], |
| | I14 = [−78, −77], I3 = [−57, −56], I1 = [−49, −48], I1 = [−38, −37], I3 = [93, 94], L1 = [−73~−69], |
| | L2 = [−93~−93, 32~33, 97~98], L3 = [37~38, 89~90], L4 = [22~25], L5 = [−63~−62], L6 = [−54~−54], L8 = [−98~−96] |
| Struc1640 | M = [−16, −4, 0, 65, 71, 77, 83], W = [−15, −11, −10, −6, 8, 48, 58, 78, 80, 81, 89], D = [35, 53], I1 = [56, 57], L2 = [26~28, 31~32], L3 = [94~95], L4 = [41~43] |
| Struc1641 | M = [−4, 51, 61, 75, 99], W = [2, 6, 18, 38, 80, 89], D = [31, 32, 33, 34, 39, 40, 41, 42, 43, 44, 45], I5 = [−11, −10], L2 = [−14~−14], L3 = [93~95] |
| Struc1642 | M = [−15, 52, 59, 62, 74, 79], W = [−14, −8, 15, 34, 67, 69, 76], I2 = [89, 90], L2 = [−6~−5], L3 = [−11~−9, 32~33, 40~41], L4 = [29~30] |
| Struc1643 | M = [−43, −39, −37, −33, −5, 16, 22, 35, 52, 80, 96], W = [−25, −44, −31, −18, −14, −12, 15, 46, 48, 56, 68, 79, 82], D = [−61, −60, −59], I5 = [−26, −25], |
| | I3 = [36, 37], L2 = [−30~−29, 60~61, 70~71, 75~76] |
| Struc1644 | M = [−21, 0, 3, 14, 40, 54], W = [−25, −7, 32, 38, 61, 79], L2 = [80~81], L4 = [−11~−8] |
| Struc1645 | M = [−23, −3, 7, 30, 38, 56, 77, 84], W = [−31, −19, 21, 26, 73, 79], I2 = [−34, −33], L2 = [−27~−26, −16~−14, 94~95], L3 = [62~64] |
| Struc1646 | M = [−16, −4, 0, 11, 34, 36, 42, 50, 57, 73, 96], W = [−13, −11, −5, 4, 16, 27, 28, 47, 55, 59, 85, 90], I1 = [98, 99], L7 = [77~83] |
| Struc1647 | M = [18, 82], W = [−15, −13, −12, −10, 14, 15, 30, 49, 69, 88], L2 = [−17~−16, −7~−6, 26~27, 36~37] |
| Struc1648 | M = [−62, −34, −20, 32, 44, 60, 63, 69], W = [−68, −61, −48, −35, −8, −5, 6, 7, 24, 30, 50, 70, 82], D = [18, 35], L2 = [−57~−56, −13~−11, 11~12, 21~22, 37~38, 73~74], |
| | L3 = [−51~−49, −7~−7] |
| Struc1649 | M = [3, 13, 28, 50, 67, 91, 99], W = [32, 33, 41, 42, 27, 14, 75, 85, 86, 98], L2 = [72~73, 82~83], L3 = [34~36] |
| Struc1650 | M = [−97, −87, −85, −14, −46, −44, −38, −23, 0, 6, 9, 33, 39, 57, 64, 72], W = [−90, −88, −59, −58, −47, −40, −16, 22, 66, 67, 80], D = [12, 13, 14, 15, 16], |
| | I5 = [21, 22], L2 = [78~79] |
| Struc1651 | M = [−35, −27, 25, 31], W = [−88, −80, −57, −50, −49, −12, −10, 5, 12, 42, 44, 46, 79, 86, 87, 93], D = [−15, 60], I1 = [−83, −82], I1 = [4, 5], L1 = [−87~−85, 69~70], |
| | L2 = [−46~−45, −20~−20, −1~1, 37~38, 95~96], L3 = [33~35] |
| Struc1652 | M = [−86, −46, −42, −38, 2, 45], W = [−91, −81, −44, −35, −15, −14, −12, 6, 17, 21, 27, 34, 36, 48, 60], D = [−55, −54, −53, −52, 33, 59, 65, 70], I1 = [−91, −90], |
| | I9 = [−68, −67], I1 = [−23, −22], I7 = [23, 24], I15 = [55, 56], I1 = [68, 69], I1 = [77, 78], L1 = |
| | [−28~−27, 74~75], L2 = [14~15, 39~40], L3 = [−74~−72, 27~29], L4 = [53~54], L5 = [−78~−78, 49~50, 83~97], L15 = [−62~−62] |
| Struc1653 | M = [−12, −9, 0, 80, 82, 99], W = [−19, −10, −3, 66, 73, 77, 85, 98], D = [12, 44, 45, 70], I1 = [73, 14], L2 = [28~29, 49~50, 59~60], L4 = [33~36] |
| Struc1654 | M = [−12, 0, 27, 66, 97], W = [−11, 31, 32, 55, 57, 96, 99], D = [−8, 59], I1 = [−6, −5], L2 = [49~54, 78~19], L4 = [13~16, 42~43, 88~91] |
| Struc1655 | M = [−15, −9, 51, 61, 67, 73], W = [2, 6, 53, 68, 82, 90, 99], I3 = [84, 85], L1 = [91~94], L2 = [35~39], L3 = [43~45] |
| Struc1656 | M = [−63, −50, −44, −29, −23, −14, 3], W = [−96, −93, −89, −46, −43, −38, −18, −4, 4, 16, 23, 32, 34, 40], D = [−34, −33, −32, 30], I2 = [−89, −88], L2 = [26~27], |
| | L3 = [35~37] |
| Struc1657 | M = [−13, 25, 49, 54, 61, 69, 71, 80, 89], W = [−22, −17, 13, 21, 29, 38, 55, 57, 65, 81, 90, 93], I1 = [−18, −17], L2 = [−7~−6, 36~37], L4 = [5~8], L7 = [29~34] |
| Struc1658 | M = [−96, −83, −77, −71, −52, −49, −33, −3, 35, 47, 92, 94], W = [−92, −76, −64, −60, −51, −36, −15, −8, −7, 52], D = [82, 83], I1 = [19, 20], L2 = [37~38, 59~60, 98~99], |
| | L3 = [25~26], L4 = [66~69] |
| Struc1659 | M = [−2, 0, 46, 73, 96], W = [−17, −11, 60, 65], D = [−8, 43, 56], I1 = [−11, −10], I4 = [29, 30], I14 = [32, 33], L2 = [52~53, 58~59, 76~17, 90~91] |
| Struc1660 | M = [−53, −40, −36, −9, −3, 32, 47, 60, 70, 80], W = [−95, −94, −59, −54, −49, −41, 43, 44, 50, 53, 83], D = [−79, 78, −77, −76, −75, −74, −73, −72, −71, −33, 13, 14, 15, |
| | 16, 17, 18, 19, 20, 21, 22, 23, 24, 25], I1 = [−18, −17], I2 = [35, 36], L2 = [92~93], L3 = [−62~−60] |
| Struc1661 | M = [−52, −48, −33, −13, 1, 42, 64, 79, 96], W = [−61, −39, −38, 4, 16, 24, 47, 59, 82, 84, 93], D = [−56, 30, 31], I10 = [−61, −60], I2 = [−19, −18], L1 = [−23~−21], |
| | L2 = [−30~−29], L3 = [74~76], L4 = [34~37], L5 = [86~90] |
| Struc1662 | M = [31, 33, 52, 62, 84], W = [−14, 2, 54, 55, 69, 86], D = [−10, −9, −8], I3 = [−5, −4], I5 = [28, 29], I2 = [86, 87], L3 = [40~41, 12~14] |
| Struc1663 | M = [−78, −58, −53, −43, −21, −15, −1, 8, 18, 26, 71, 74, 79, 81], W = [−99, −98, −94, −93, −79, −77, −69, −59, −54, 4, 21, 56, 57, 59, 62, 78, 88], D = [94, 95], |
| | I1 = [40, 41], L8 = [33~34], L1 = [−36~−33], L2 = [−28~−27, 65~66, 89~90], L4 = [−39~−39] |
| Struc1664 | M = [−9, −1, 6, 19, 26, 29], W = [7, 20, 32, 33, 37, 41, 55, 79], L2 = [−13~−12, 14~15, 34~35, 81~82], L3 = [88~91] |
| Struc1665 | M = [−69, −63, −49, −43, −5, 10, 40, 81, 83, 95], W = [9, 22, 23, 46, 49, 93], L2 = [−95~−94], L5 = [52~56], L6 = [−28~−26] |
| Struc1666 | M = [−13, −3, 0, 19, 51, 54, 61], W = [24, 35, 49, 83], I1 = [10, 11], L2 = [−9~−8], L4 = [4~7], L13 = [29~33] |
| Struc1667 | M = [−7, −3, 11, 20, 22, 51, 56, 60, 64, 67, 92], W = [−53, −51, −49, −45, −36, −32, −18, −12, −10, −5, 4, 6, 10, 14, 18, 19, 34, 5, 72, 74, 84, 93], I1 = [−48, −4], |
| | I2 = [43, 44], L1 = [32~33, 39~40], L3 = [70~71, 74~76], L4 = [−44~−42], L5 = [79~80], |
| | L9 = [−63~−55] |
| Struc1668 | M = [2, 12, 30, 36, 50, 71], W = [−15, −10, 31, 33], D = [−17, −16], I11 = [83, 84], L1 = [94~95], L2 = [−12~−11, −1~0], L3 = [79~80] |
| Struc1669 | M = [−41, −31, −22, −15, −12, −8, 0, 10, 28, 50], W = [−39, −30, 7, 24, 31, 45, 64, 92], I3 = [43, 44], I15 = [56, 57], I15 = [64, 65], I1 = [65, 66], I11 = [67, 68], |
| | I11 = [73, 74], I1 = [83, 84], I4 = [90, 91], L2 = [58~59, 71~72, 86~87], L3 = [38~40], L6 = |
| | [78~79, 94~96] |
| Struc1670 | M = [−4, 3, 11, 22, 62, 71, 79], W = [−13, −7, 13, 27, 28, 31, 41, 43, 44], D = [33], I1 = [36, 37], I1 = [48, 49], L2 = [−1~0, 51~52, 96~97] |
| Struc1671 | M = [0, 1, 38, 56, 62, 64, 95], W = [−36, −33, 8, 32, 73], D = [−18, −17, −16, −15, −14, 5], L2 = [−32~−31], L4 = [−26~−26] |
| Struc1672 | M = [−20, −6, 3, 15, 30, 61, 88, 97], W = [−21, −9, −8, 9, 55, 65, 70, 71, 75, 80, 94], D = [84], L2 = [−1~0, 78~79], L3 = [36~38, 52~54], L4 = [46~49] |
| Struc1673 | M = [−41, −31, −27, −24, −21, 0, 8, 24], W = [−87, −73, −59, −55, −54, −46, −43, −38, −36, −28, −4, 6, 9, 37], D = [−13, −12], I2 = [−75, −74], I9 = [30, 31], |
| | I10 = [37, 38], L2 = [−83~−82, −51~−50, −9~−8] |
| Struc1674 | M = [−72, −50, −43, −40, −28, 10, 31], W = [−91, −51, −36, −27, −20, −11, −7, −5, −4, 28, 32, 33], L8 = [−88~−80], L1 = [42~45], L2 = [−1~0], L4 = [38~39] |
| Struc1675 | M = [−13, −3, 0, 25, 71], W = [−24, 29, 37, 38, 57, 93, 94], D = [10, 11], I5 = [−19, −18], L2 = [79~80, 88~89], L3 = [−9~−7, 30~32], L4 = [5~6] |
| Struc1676 | M = [−94, −87, −67, −20, 0, 10, 96], W = [−95, −78, −53, −50, −36, −9, −6, 42, 81, 86], D = [−59, −28, −27, 91, 92, 93], I2 = [36, 37], I3 = [86, 87], |
| | L2 = [−85~−84, −52~−51, 43~44], L3 = [−44~−42, 23~25] |
| Struc1677 | M = [−49, −45, −34, −20, 18, 23, 32, 35, 44, 80], W = [−55, −35, −17, −7, −5, 7, 51, 86, 87, 88], D = [69, 70], I1 = [−62, −61], I2 = [73, 74], L2 = [−57~−56, 29~30], |
| | L6 = [−12~−8] |
| Struc1678 | M = [36, 49, 59, 61, 80], W = [−3, 2, 37, 60, 66, 77, 85, 88, 98], D = [12, 70], I1 = [74, 75], I1 = [98, 99], L2 = [−1~0, 28~29], L3 = [32~34], L4 = [−9~−8] |
| Struc1679 | M = [−13, 5, 18, 33, 42, 49, 55, 61, 67, 82, 88], W = [−37, −35, −32, −29, −25, −24, −3, 8, 29, 30, 55, 59, 65, 72, 75, 81, 83], D = [−18, −17, −6, 11], I1 = [−9, −8], |
| | L2 = [−1~0, 37~38, 63~64, 79~80], L4 = [−33~−33] |
| Struc1680 | M = [−10, −4, 35, 68, 58], W = [−6, 7, 20, 47, 52, 56, 96], I1 = [42, 43], I3 = [76, 77], L1 = [30~33, 39~40, 81~84], L2 = [57~58], L3 = [3~5] |
| Struc1681 | M = [−10, −6, 5, 36, 41, 63, 90], W = [−17, 13, 15, 32, 33, 37, 54, 57, 73, 79, 93], D = [86], I1 = [−19, −18], I13 = [55, 56], I1 = [71, 72], I1 = [82, 83], |
| | L2 = [−1~0, 27~28], L3 = [75~77], L4 = [68~69] |
| Struc1682 | M = [19, 65], W = [−6, 16, 44, 49, 53, 60, 61], D = [11], L2 = [−9~−8, −1~0, 54~55], L3 = [−21~−21], L5 = [36~40] |
| Struc1683 | M = [−18, 7, 27, 36, 5, 65], W = [−16, −12, 57, 72], I1 = [47, 48], I2 = [89, 90], L1 = [85~87], L2 = [−1~0], L3 = [43~45] |
| Struc1684 | M = [−93, −75, −41, −38, −28, −19, 0, 25, 54, 59], W = [−99, −98, −83, −50, −30, −15, −14, −7, 2, 6, 11], D = [23, 29], L2 = [−69~−68], L3 = [34~36], L6 = [−89~−84] |
| Struc1685 | M = [−98, −80, −70, −55, −49, −39, −34, −14, −10, 40], W = [−93, −63, −45, −38, −33, −24, −21, −12, 25, 32, 33, 39], L2 = [−67~−67, −29~−28, −6~−5], L4 = [−92~−89] |
| Struc1686 | M = [−2, 0, 32, 44, 51, 68, 80, 82, 91, 95, 98], W = [11, 24, 26, 37, 53, 72, 75], L2 = [−12~−9], L4 = [−15~−15] |
| Struc1687 | M = [−95, −92, −86, −74, −67, −61, −51, −48, −36, −19, 18, 27, 30, 39, 45], W = [−97, −96, −82, −73, −54, −44, −41, −30, −17, −16, 4, 13, 21, 22, 29], I1 = [−27, −26], |
| | L2 = [−10~−9], L3 = [−34~−31, −15~−13] |
| Struc1688 | M = [−17, −12, −7, 5, 14, 22, 58], W = [−55, −26, −25, −10, −9, −4, 6, 9, 31, 64, 71, 72, 79, 80], D = [62], I1 = [33, 34], I3 = [83, 84], L2 = [16~17], L3 = [−46~−44, 37~40] |
| Struc1689 | M = [−57, −53, −33, −29, −13, 0, 32, 35, 37, 46, 64, 96], W = [−64, −30, −24, −5, 7, 24, 25, 43, 59, 53, 82, 84, 90, 93], I1 = [−61, −60], I2 = [−27, −26], L1 = [−22~−19], |
| | L4 = [73~76, 85~88] |
| Struc1690 | M = [−52, −49, −34, −31, −20, 22, 28, 44, 60, 63, 69, 73, 98], W = [−48, −43, −42, −37, 6, 7, 24, 50, 70, 71, 82], I1 = [−38, −37], I3 = [−7, −6], I3 = [31, 32], |
| | L1 = [35~38], L2 = [−13~−10, 11~12], L7 = [−57~−56] |
| Struc1691 | M = [0, 18, 33, 45, 63, 69, 90], W = [2, 14, 52, 60, 70, 75, 92, 93, 98], D = [40, 41], I2 = [59, 60], L8 = [47~49], L2 = [−5~−4, 56~57] |
| Struc1692 | M = [0, 33, 36, 91], W = [−17, −15, 2, 83, 85, 88, 89, 90, 100], D = [70], I1 = [74, 75], L2 = [−12~−12, 49~50, 59~60, 79~80] |
| Struc1693 | M = [2, 10, 28, 50, 57, 99], W = [41, 42, 47, 51, 53, 59, 74, 75, 80, 85, 86, 98], L1 = [44~46], L2 = [13~14, 35~36, 72~73, 82~83] |
| Struc1694 | M = [0, 15, 33, 47], W = [43, 60, 61, 81, 82, 95], I1 = [−12, −11], I1 = [−6, −5], I11 = [29, 30], L2 = [51~52] |
| Struc1695 | M = [−78, −50, −16, −6, 54, 66, 80, 92], W = [−63, −37, −32, −26, −22, −10, 30, 31, 32, 39], D = [−70, 36, 37, 38, 72, 73], I4 = [−30, −29], I13 = [−23, −22], I2 = [8, 9], |
| | L1 = [−89~−88], L2 = [−1~0, 11~12], L3 = [75~76], L4 = [42~43] |
| Struc1696 | M = [−71, −66, −46, −20, −13, 0, 8, 95], W = [−89, −80, −59, −57, −51, −50, −44, −43, −42, −29, −12, −6, 5, 38, 42, 44, 45, 46, 49, 58, 79], D = [86], |
| | L2 = [−27~−26, 32~33, 36~37], L4 = [−87~−83, 1~4], L6 = [−37~−32] |
| Struc1697 | M = [−10, −4, 3, 11, 22, 33, 58, 71, 79, 82, 86], W = [−13, 27, 41, 43, 44, 88], I1 = [48, 49], L2 = [−1~0], L3 = [50~52, 96~95] |
| Struc1698 | M = [−47, −13, 7, 15, 40, 49, 57, 77], W = [−58, −57, −50, −22, −36, −33, −32, −10, −9, −2, 9, 10, 17, 18, 35, 70], I1 = [−45, −44], I1 = [72, 73], L9 = [83~92], |
| | L2 = [−1~0, 80~81], L3 = [−22~−22, 63~66] |
| Struc1699 | M = [−12, −6, 7, 30, 32, 44, 82, 90], W = [−11, 28, 31, 45, 70, 78, 89, 99], I4 = [28, 29], I4 = [84, 85], L1 = [65~67], L2 = [−1~0, 74~76, 36~97], L3 = [57~59] |
| Struc1700 | M = [−88, −82, −78, −50, −29, −19, −16, 66, 80, 86, 92], W = [−98, −52, −51, −37, −32, −27, 12, 30, 39, 47, 65, 91], D = [−22, 41], I7 = [−98, −97], I2 = [8, 9], |
| | I2 = [30, 31], I2 = [43, 44], L1 = [35~38], L2 = [−6~−5, −1~0, 53~54], L5 = [72~76] |
| Struc1701 | M = [−17, −11, 3, 82, 91], W = [51, 52, 65, 67, 78, 86], L1 = [26~32], L2 = [−1~0, 36~37, 57~64] |
| Struc1702 | M = [−71, −53, −43, −33, −30, −21, −8, 18, 26, 32, 40, 89, 95], W = [−99, −98, −93, −92, −83, −79, −78, −77, −76, −59, −37, −36, 21, 56, 57, 59, 60, 78, 88], |
| | I1 = [65, 66], L2 = [−28~−27, −2~−1], L3 = [7~9, 46~48] |
| Struc1703 | M = [−12, 0, 15, 36, 70], W = [9, 31, 32, 38, 65, 75, 81, 88], I6 = [−6, −5], L2 = [7~8, 29~30, 54~55, 79~80], L3 = [44~46] |
| Struc1704 | M = [−33, −25, 0, 15, 32, 38, 59, 65, 75, 92, 95], W = [16, 25, 30, 43, 61, 62, 71, 87, 94], I1 = [−31, −30], L2 = [54~55, 80~81], L4 = [−6~−3] |
| Struc1705 | M = [0, 4, 13, 35, 37, 57, 67, 74, 83], W = [−13, −12, 27, 54, 79, 87], D = [44, 45], L2 = [−17~−16] |
| Struc1706 | M = [−89, −84, −62, −53, −46, −23, −4, 0, 9], W = [−87, −86, −63, −33, −32, −26, −11, −8, 8], D = [−97], I4 = [27, 28], L2 = [13~14] |
| Struc1707 | M = [−33, −24, 36, 54, 65, 80], W = [−37, −35, −34, −31, −30, −27, −13, −6, 7, 37, 38, 61], D = [−11, −10], L2 = [−1~0, 93~94], L3 = [10~13, 30~32], L4 = [71~75], |
| | L7 = [−29~−29], L15 = [−20~−20] |
| Struc1708 | M = [−3, 0, 27, 36, 82], W = [−11, 11, 26, 28, 32, 48, 60, 75], I1 = [48, 49], L2 = [−16~−15] |
| Struc1709 | M = [−89, −81, −78, −52, −29, 6, 27, 43, 54, 89, 97], W = [−87, −84, −75, −62, −56, −26, 52, 58, 59, 62, 82], I4 = [−57, −56], I1 = [−51, −50], I3 = [−45, −44], |
| | L2 = [−96~−95, −64~−63, −23~−22, −1~0, 69~70, 76~79], L3 = [−48~−47, 33~34, 47~49], L4 = [−40~−36] |
| Struc1710 | M = [−13, 33, 36, 91], W = [−17, −14, 2, 28, 44, 48, 73, 85, 90, 100], D = [71], L2 = [−1~0, 49~50, 88~89], L11 = [74~82] |
| Struc1711 | M = [−11, 0, 5, 34, 86, 91], W = [−14, −12, 8, 18, 21, 35, 36, 44, 47, 58, 64, 94, 95, 97, 100], D = [23], I5 = [−5, −4], L1 = [66~69], L2 = [26~29, 40~41, 52~53, 59~60], |
| | L3 = [62~63, 73~75] |
| Struc1712 | M = [−95, −49, −15, −9, −6, −1, 5, 14, 18, 41, 67, 71, 80], W = [−80, −76, −75, −74, −73, −60, −51, −50, −33, −30, −27, −16, −4, 6, 10, 20, 68, 72, 91, 95], D = [−44], |
| | I5 = [−88, −87], I1 = [−80, 79], I3 = [−28, −27], L2 = [−68~−67, 34~35], L3 = [26~28], L4 = |
| | [95~97] |
| Struc1713 | M = [−75, −67, −51, −21, −18, 10, 34, 73, 99], W = [−82, −72, −53, −42, 22, 56, 80, 86, 89, 90, 92, 93], D = [−26, 44, 45, 46, 47, 48, 49, 50, 51, 52, 53, 54, 55], |
| | L2 = [−63~−62, −37~−36, −1~0], L4 = [59~66] |
| Struc1714 | M = [39, 54, 86], W = [−5, 20, 24, 32, 43, 57, 81, 82, 97], I13 = [36, 37], I14 = [42, 43], I3 = [44, 45], I13 = [59, 60], I4 = [65, 66], L2 = [−16~−15, 94~95], |
| | L3 = [−11~−10, 32~33], L7 = [27~30] |
| Struc1715 | M = [−89, −86, −41, 15], W = [−99, −50, −30, −26, −11, −9, −7, 20, 22, 43], D = [−21, −13, 5], I1 = [−23, −22], I3 = [−7, −6], I4 = [19, 20], I10 = [39, 40], I13 = [43, 44], |
| | L2 = [27~28], L3 = [10~13, 34~37], L5 = [−3~0], L6 = [24~25] |
| Struc1716 | M = [−83, −77, −55, −50, −42, −27, 2, 9, 15, 30, 40, 43, 52, 55, 76, 81], W = [−89, −76, −70, −64, −63, −60, −53, −5, 22, 23, 25, 29, 39, 44, 79, 97], D = [−98, 96], |
| | I3 = [31, 32], L2 = [−72~−71, −1~0, 34~36, 47~48], L3 = [−15~−15, −7~−7], L4 = [89~92] |
| Struc1717 | M = [7, 62, 69], W = [−15, −11, −9, −8, 4, 39, 48, 82, 93], D = [46, 47], I1 = [26, 27], L2 = [28~29], L6 = [32~38] |
| Struc1718 | M = [−97, −93, −90, −80, −54, −27, 2, 23, 35, 40, 69], W = [−68, −63, −61, −5, 22, 41, 57, 70], I8 = [−86, −85], L2 = [−30~−29, −1~0, 11~12, 47~48] |
| Struc1719 | M = [−14, −10, 0, 13, 30, 36, 65, 80], W = [−36, −35, −26, −9, −8, −6, 37, 61, 62], L2 = [−28~−27, 93~94], L3 = [−20~−20, 54~56], L4 = [−24~−24, 72~75], L6 = [−31~−30] |
| Struc1720 | M = [−74, −55, −52, −44, −36, −18, −16, −9, −6, 13, 16, 41, 46, 49], W = [−64, −63, −43, −42, −35, −34, −27, −26, 28, 54], I9 = [−29, −28], L1 = [−82~−79], |
| | L2 = [−86~−85, −76~−76, −1~0, 5~6], L3 = [35~37] |
| Struc1721 | M = [−98, −87, −84, −65, −62, −53, −43, −4, 0, 17, 38], W = [−80, −58, −33, −26, −3, 8, 21, 33], I4 = [27, 28], L2 = [−21~−40, 13~14] |
| Struc1722 | M = [−62, −44, 22, 35, 60, 71, 77], W = [−59, −10, −9, −7, 6, 14, 16, 42, 51, 63, 64, 92], L2 = [−51~−50, 17~18], L3 = [−5~0, 8~10, 39~41] |
| Struc1723 | M = [−18, 10, 14, 26, 82], W = [−19, −17, −11 21, 27, 28, 59, 68, 72], L2 = [−13~−12] |
| Struc1724 | M = [−10, 0, 44, 55, 87, 89], W = [−17, −12, 11, 33], L2 = [27~28, 78~79], L3 = [35~37] |
| Struc1725 | M = [−16, −14, −11, 0, 29, 33, 48, 55, 65, 80], W = [−13, 26, 35, 36, 45, 61, 71, 79], D = [43, 44], I1 = [10, 11], I1 = [52, 53], I9 = [71, 72] |
| Struc1726 | M = [41, 54, 79, 95], W = [−10, −5, 13, 32, 37, 39, 81, 82, 97], D = [44, 75], I1 = [−10, −9], I8 = [28, 29], I14 = [29, 30], I2 = [32, 33], I12 = [36, 37], L1 = [−16~−15], |
| | L2 = [−1~0, 60~61, 85~86] |
| Struc1727 | M = [−85, −28, −4, 31, 39], W = [−86, −71, −70, −69, −68, −51, −5, 6, 21, 28, 40], I15 = [−80, −79], I14 = [−76, −75], I15 = [−74, −73], I15 = [−72, −71], I15 = [−71, −70], |
| | I14 = [−70, −69], I15 = [−69, −68], I15 = [−68, −67], I15 = [−67, −66], I1 = |
| | [50, 51], L1 = [45~46] |
| Struc1728 | M = [0, 12, 18, 25, 36, 66, 68], W = [−20, −5, 11, 28, 29, 30, 37, 39, 54, 57, 62, 63, 90, 97], D = [71, 75, 76, 95], I9 = [−13, −12], I3 = [45, 46], I7 = [54, 55], |
| | L1 = [63, 64], I5 = [90, 91], L2 = [−18~−17, −7~−6, 48~49], L3 = [83~85] |
| Struc1729 | M = [8, 22, 46, 55, 67, 79], W = [9, 38, 61, 64], L4 = [−6, −5], I6 = [48, 49], L2 = [−1~0, 70~71], L4 = [91~94] |
| Struc1730 | M = [−94, −84, −35, −25, −2, 0, 29], W = [−85, −51, −50, −28, −24, −18, 42, 43], D = [−81, −80, −79, −78, −13, −12], L2 = [−59~−58, −20~−19, 32~33] |
| Struc1731 | M = [−39, −23, 0, 12, 41, 54, 67, 84], W = [−43, −31, −7, 2, 7, 40, 70, 87, 96, 99], L2 = [31~32] |
| Struc1732 | M = [−12, −6, 46, 53, 63, 88], W = [−10, −8, 37, 67, 75, 77, 87], D = [68, 69, 70, 71], L2 = [20~21, 39~42], L5 = [27~28] |
| Struc1733 | M = [−92, −68, −31, −16, −12, −9, −6, 13, 18, 33, 64, 86], W = [−32, −20, −10, 12, 30, 32, 46, 51, 72, 75, 82, 63, 85, 87, 88], D = [−82, −81, −80, −19, −78, −77, −76, 78], |
| | I7 = [−39, −38], I2 = [29, 30], I1 = [35, 36], I4 = [60, 61], I1 = [90, 91], |
| | L1 = [−45~−43, 42~45], L2 = [−98~−97, −85~−84, −26~−25, −1~0], L4 = [94~97] |
| Struc1734 | M = [−11, −4, 3, 5, 11, 22, 42, 49, 61, 65, 71, 80], W = [−12, −10, 13, 27, 28, 43, 51, 78], D = [74, 75], I2 = [52, 53], I1 = [86, 87], L2 = [32~33, 36~37], L4 = [81~83] |
| Struc1735 | M = [−13, 26, 36, 54, 66, 98], W = [−16, −11, −10, 27, 28, 37, 59, 60, 68, 80, 92], L1 = [49~52], L2 = [−1~0, 9~10, 73~14], L6 = [81~56] |
| Struc1736 | M = [−42, −13, 0, 17, 75], W = [−96, −91, −90, −59, −55, −50, −10, −9, −4, 6, 33, 40, 70, 77, 78], D = [−69, −68, −67, −66, −65, −64, −63, −62, −49, −48, −47, 9], |
| | I2 = [−84, −83], I2 = [35, 36], I3 = [83, 84], L2 = [−22~−21, 21~22], L3 = [−78~−78, −7~−5, 11~13] |
| Struc1737 | M = [−35, −26, 10, 64, 80], W = [−37, −33, −24, 30, 51, 58, 68, 73, 90, 97], I2 = [−24, −23], I14 = [−20, −19], I5 = [46, 47], I3 = [50, 51], I1 = [54, 55], L1 = [71~72], |
| | L2 = [−31~−30, −1~0, 28~29, 39~42, 83~85, 91~92], L3 = [−9~−7] |
| Struc1738 | M = [−40, −14, −7, 18, 20, 26, 29, 36, 40, 68, 75, 83], W = [−43, −38, −35, −29, 50, 51, 69], D = [7, 98], I1 = [9, 10], L2 = [−37~−36, 12~13, 86~87], L5 = [−52~−48] |
| Struc1739 | M = [−32, −15, 15, 45, 73], W = [−29, 18, 19, 29, 33, 44, 71, 77, 87, 91], D = [5], I12 = [86, 87], I15 = [87, 88], I14 = [89, 90], I14 = [90, 91], I10 = [91, 92], |
| | L1 = [9~12], L2 = [−1~0, 31~32, 36~39, 62~63] |
| Struc1740 | M = [−13, −9, 0, 41, 65, 77], W = [−11, 55, 60], D = [43, 95, 96], I8 = [31, 32], I10 = [34, 35], L2 = [53~54, 58~59] |
| Struc1741 | M = [45, 61, 72, 79], W = [31, 36, 49, 96, 99], D = [59], I1 = [18, 19], I1 = [56, 57], I1 = [83, 84], L2 = [−17~−15, −1~0, 34~35, 40~41, 91~92], L3 = [51~53], |
| | L4 = [−12~−10, 97~98] |
| Struc1742 | M = [−28, −17, −3, 3, 10, 15, 57, 73], W = [−14, −5, 36, 41, 71], I12 = [47, 48], I1 = [81, 82], L10 = [48~49], L2 = [78~79, 84~86], L4 = [−11~−8] |
| Struc1743 | M = [−12, −6, 0, 33, 46, 53, 63], W = [37, 75, 76, 87], L1 = [40~42], L2 = [20~21, 69~70], L6 = [27~29] |
| Struc1744 | M = [33, 65, 72, 82], D = [10, 22, 24, 46, 71, 100], L2 = [−13~−12, 12~13, 19~20, 87~88, 93~94], L3 = [36~38] |
| Struc1745 | M = [−36, −25, −7, 2, 24, 83], W = [16, 21, 64, 65, 95, 100], D = [30, 33], I1 = [27, 28], L2 = [−31~−30, 42−43, 93−94], L3 = [85~87], L4 = [6~9], L13 = [−51~−51] |
| Struc1746 | M = [43, 54, 94], W = [33, 34, 39, 41, 81, 82], D = [75], I14 = [27, 28], I12 = [33, 34], I3 = [44, 45], L2 = [−16~−15, −1~0, 60~61, 85~86], L3 = [−11~−10], |
| | L4 = [28~30], L5 = [39~40] |
| Struc1747 | M = [1, 18, 34, 43, 45, 51, 61, 63, 73], W = [−14, −11, −10, −8, 32, 44, 50, 53, 56, 14, 76], D = [80, 81, 82, 83, 84, 85, 86, 87, 88, 89], L2 = [67~66], |
| | L4 = [3~4], L7 = [37~39] |
| Struc1748 | M = [−75, −69, −63, −41, −38, −35, −19, 0, 10, 23, 35, 41, 49, 53, 57], W = [−71, −31, −14, 6, 32, 33, 61], D = [−93, 28, 29, 30], L1 = [−84~−80], L2 = [−91~−90], |
| | L6 = [−98~−98] |
| Struc1749 | M = [−62, −31, −23, −19, −8, 10, 22, 32, 35, 40, 57, 60, 71, 91, 94], W = [−59, −58, −47, −35, −10, −9, −4, 12, 14, 16, 41, 63, 64, 92], D = [77, 78], I12 = [47, 48], |
| | L2 = [−55~−54, −51~−50, −46~−45, 17~18, 50~51] |
| Struc1750 | M = [−2, 47, 53, 77, 80, 85], W = [41, 58, 63, 65, 66], D = [12, 43], I1 = [−17, −16], I2 = [−12, −11], I2 = [−9, −8], I1 = [8, 9], I14 = [26, 27], I4 = [27, 28], |
| | L2 = [59~60], L3 = [94~96] |
| Struc1751 | M = [−44, −7, 8, 19, 31, 55, 83, 95], W = [−49, −9, −8, 23, 26, 39, 66, 74], D = [−39, −38, −31, −30, −23, −22], L1 = [3~4], L2 = [−1~0, 62~63] |
| Struc1752 | M = [−16, −14, 33, 48, 80], W = [−13, −12, 31, 32, 35, 45, 61], D = [43, 44], I1 = [9, 10], I1 = [52, 53], I5 = [64, 65], I4 = [67, 68], L2 = [−1~0] |
| Struc1753 | M = [−10, 13, 36, 65, 80], W = [−38, −35, −30, −29, −24, −20, −9, −8, −6, 7, 25, 37, 61, 71, 96, 97], D = [−14], I3 = [−30, −29], I11 = [−22, −21], I1 = [4, 5], |
| | L2 = [−37~−36, −28~−27], L3 = [30~32, 54~56], L4 = [−3~0, 72~75] |
| Struc1754 | M = [36, 41, 49, 57, 59, 74, 86, 93], W = [−10, −8, 13, 18, 46, 62, 83, 90, 92], D = [−7, −6, −5, 1, 2, 16, 17], I3 = [−17, −16], I2 = [5, 6], L2 = [−14~−13], L4 = [78~81] |
| Struc1755 | M = [−93, −70, −51, −43, −35, −21, 30, 42, 58, 67, 98], W = [−97, −62, −52, −22, −8, 9, 10, 11, 12, 55, 70, 84, 88, 97], I2 = [47, 48], I1 = [73, 14], L1 = [34~37, 76~77], |
| | L2 = [−83~−82, −77~−76, −38~−37, 21~22], L3 = [15~17], L5 = [−1~3] |
| Struc1756 | M = [−19, 0, 28, 50, 54, 72, 84, 86, 95], W = [37, 71, 82], D = [69, 70, 77], I2 = [66, 67], L2 = [61~62] |
| Struc1757 | M = [8, 25, 32, 61, 68, 87], W = [−15, −2, 11, 37, 38, 54, 57, 93, 94], L2 = [−13~−12, −9~−8, −1~0, 79~80] |
| Struc1758 | M = [−48, −38, −29, −20, 1, 10, 27, 35, 37, 41, 49], W = [−63, −59, −50, −49, −46, −39, −30, 1, 8, 43, 59, 90, 93], D = [−62, −61, −60, −52], I2 = [83, 84], L1 = [86~88], |
| | L2 = [−23~−22, 30~31], L3 = [−15~−13, 62~64, 74~76] |
| Struc1759 | M = [−43, −33, −21, −14, 40, 43, 89], W = [−99, −98, −93, −63, −79, −77, −59, −37, −36, −15, 21, 22, 48, 56, 57, 59, 60, 66, 78, 79, 88, 94], D = [26], I6 = [32, 33], |
| | I1 = [65, 66], L2 = [−2~−1, 5~8, 17~18], L3 = [−29~−27] |
| Struc1760 | M = [−17, 0, 35, 41, 65, 88], W = [−11, −10, −8, 33, 36, 37, 77, 78], D = [53], I2 = [43, 44], L2 = [56~57] |
| Struc1761 | M = [−68, −66, −17, −14, −9, −5, 2, 44, 50, 92, 96], W = [−74, −41, −37, −22, 12, 13, 16, 25, 45], D = [−81, −80, −58, −57, −56, −55, −54, −53, −52, −51, −50, −49, −48, 37, |
| | 62, 63, 64, 65, 66, 57, 68, 69, 70, 71], I2 = [29, 30], L2 = [−92~−91, −27~−26, −1~0, 33~35], L3 = |
| | [−97~−97, 75~77, 85~87] |
| Struc1762 | M = [−95, −67, −46, −40, −27, −10, 18, 34, 42, 69, 81, 91, 97], W = [−93, −80, −76, −74, −47, −16, −14, −6, 6, 17, 20, 53, 68, 75], I5 = [−88, −87], I3 = [−26, −25], |
| | I2 = [94, 95], L2 = [−92~−91, −2~−1, 8~9, 13~14, 49~50, 57~58] |
| Struc1763 | M = [−16, −13, 1, 4, 42, 44, 49, 68, 73, 88], W = [−12, 16, 27], D = [98], L2 = [31~32, 35~37], L3 = [11~13] |
| Struc1764 | M = [−18, 0, 33, 37, 73, 93], W = [−10, −5, 27, 41, 42, 44, 72, 85], D = [80, 90], I1 = [82, 83], I1 = [99, 100], L2 = [−12~−11], L4 = [49~52] |
| Struc1765 | M = [37, 49, 73, 93], W = [−5, 21, 27, 41, 42, 44, 50, 85], D = [80, 91], I1 = [82, 83], I1 = [99, 100], L2 = [−1~0, 32~33, 54~55] |
| Struc1766 | M = [−8, 0, 17, 36, 69, 72, 75, 91], W = [−6, 7, 31, 37, 38, 60, 61, 71], D = [51], I1 = [46, 47], L8 = [−18~−18], L2 = [29~30, 55~56], L3 = [62~64] |
| Struc1767 | M = [0, 20, 39, 54, 79], W = [−5, 13, 19, 32, 95, 96], D = [75], I5 = [36, 37], I1 = [45, 46], I13 = [47, 48], I10 = [50, 51], L1 = [−11~−10], L2 = [60~61, 85~86, 93~94], |
| | L3 = [32~33], L5 = [−16~−14], L7 = [27~30] |
| Struc1768 | M = [−48, −39, −37, 1, 20, 39, 42, 46, 51, 54, 63, 67], W = [−31, −22, −7, −5, 70, 99], L2 = [31~32], L4 = [85~88] |
| Struc1769 | M = [−21, −11, 14, 50, 72], W = [32, 38, 61, 62, 79, 93], L1 = [0~2], L2 = [7~8, 29~30], L3 = [67~69, 80~82] |
| Struc1770 | M = [26, 37, 43, 49, 73, 98], W = [−19, −17, −16, −5, 13, 27, 28, 41, 42, 57, 79, 85], D = [33, 80], I5 = [−17, −16], I1 = [34, 35], I1 = [82, 83], I1 = [99, 100], |
| | L1 = [−12~−10], L2 = [−1~0, 59~60, 91~93] |
| Struc1771 | M = [0, 36, 54, 82], W = [−11, 11, 26, 32, 33, 75], D = [44, 45], L2 = [90~91], L5 = [−16~−12] |
| Struc1772 | M = [36, 64, 80], W = [−17, −16, −11, −10, −5, 22, 27, 35, 41, 42, 44, 54, 72], I1 = [−2, −1], I2 = [0, 1], I1 = [87, 88], L2 = [−13~−12, 91~93] |
| Struc1773 | M = [−91, −87, −50, −44, −41, −39, −24, −5], W = [−88, −58, −57, −51, −31, −30, −14, −6, 6, 29, 61], D = [28, 38], I1 = [41, 42], I2 = [47, 48], I2 = [51, 52], |
| | I2 = [55, 56], L2 = [−82~−81, −76~−75, 10~11], L3 = [−71~−69, −36~−34, −1~1] |
| Struc1774 | M = [−96, −67, −51, −5, 49, 88], W = [−92, −86, −78, −74, −73, −61, −53, −41, −16, −11, 5, 7, 27, 31, 48, 64, 68, 81], D = [44], I5 = [−30, −29], I11 = [−19, −18], |
| | I15 = [−17, −16], I2 = [−12, −11], I12 = [−4, −3], I1 = [−2, −1], I14 = [7, 8], I1 = [12, 13], I2 = |
| | [81, 82], I1 = [83, 84], I1 = [95, 96], L2 = [−88~−87, −38~−37, −24~−23, 41~42, 53~54, 93~94], L3 = [27~28], L4 = [2~4, 33~36], L5 = [64~65], L8 = [55~59], L10 = [71~77], |
| | L12 = [20~21], L13 = [15~16] |
| Struc1775 | M = [−7, 1, 36, 60], W = [−8, 4, 11, 26, 37, 83], D = [−16], L2 = [−13~−13] |
| Struc1776 | M = [−11, 5, 32, 42, 65], W = [−33, 31, 47, 49, 53, 61, 62], D = [95], I2 = [−35, −34], I1 = [−8, −7], L1 = [−2~0, 8~9], L2 = [54~55], L3 = [36~38, 97~99], L4 = [72~75], |
| | L10 = [−19~−19] |
| Struc1777 | M = [−47, −19, −17, −7, 31, 37, 41, 54, 65, 72, 93], W = [−30, 55, 70, 79, 83, 84, 85, 86], D = [−28], I1 = [−34, −33], I2 = [−25, −24], I2 = [84, 85], L1 = [−2~0], |
| | L2 = [−39~−38, 68~69, 76~17], L3 = [2~3, 6~8, 24~26] |
| Struc1778 | M = [16, 46, 68, 74, 90], W = [−12, 28, 39, 55, 62, 63, 66], D = [43], I2 = [37, 38], I2 = [57, 58], I1 = [61, 62], I4 = [71, 72], I10 = [84, 85], L8 = [50~53], |
| | L3 = [−9~−9, 32~33], L4 = [−14~−13, −3~0], L5 = [77~81, 95~96] |
| Struc1779 | M = [27, 29, 91, 99], W = [2, 62, 81, 83, 100], D = [33, 54], I3 = [−15, −14], I1 = [−13, −12], I15 = [77, 78], L2 = [−1~0, 46~47, 59~60], L4 = [11~14, 84~87] |
| Struc1780 | M = [54, 86], W = [−5, 32, 45, 81, 89, 96, 97], I7 = [39, 40], I9 = [43, 44], I15 = [44, 45], L1 = [70~71], L2 = [−11~−11, 60~61, 94~95], L3 = [−1~1, 28~30], L7 = [32~33] |
| Struc1781 | M = [−62, −29, −18, 13, 22, 28, 48, 60, 66, 71, 77], W = [−59, −47, −35, −22, −10, −9, −4, 4, 6, 9, 15, 24, 51, 79, 80, 92], L2 = [−51~−50, −45~−44, −1~0, 17~18, 34~35] |
| Struc1782 | M = [−17, −11, 10, 29, 64], W = [−14, 12, 14, 17, 22, 23, 34, 36, 37, 38, 41, 71, 76], D = [84], I5 = [−23, −22], I1 = [72, 73], I1 = [81, 82], L2 = [77~79], |
| | L4 = [−8~−6, −1~2, 47~50] |
| Struc1783 | M = [−16, 3, 5, 27, 34, 91], W = [−15, −14, −7, −6, 31, 32, 96, 99], I13 = [−2, −1], I6 = [0, 1], I1 = [18, 19], L2 = [42~45, 58~59, 76~79], L3 = [−11~−8, 51~53] |
| Struc1784 | M = [−80, −74, −51, −38, 20, 71], W = [−92, −72, −35, −33, −30, −2, 2, 7, 16, 21, 33, 39, 40, 54, 72, 74], D = [−66], I8 = [−16, −15], I7 = [−6, −5], I15 = [−5, −4], |
| | I15 = [−3, −2], I5 = [0, 1], I15 = [5, 6], I3 = [6, 7], L1 = [88~90, 95~97], L2 = |
| | [35~36, 45~46, 77~78], L4 = [−47~−44, 63~66] |
| Struc1785 | M = [−22, −11, 24, 76, 80, 98], W = [−51, −42, −23, −21, −18, −15, −10, −2, 8, 29, 50, 61, 85], I3 = [−50, −49], I4 = [−43, −42], I1 = [−40, −39], I4 = [−29, −28], |
| | I5 = [−25, −24], I5 = [−6, −5], I13 = [−3, −2], I15 = [2, 3], I13 = [3, 4], I13 = [5, 6], I6 = |
| | [6, 7], I15 = [15, 16], I4 = [20, 21], I9 = [28, 29], I11 = [31, 32], I1 = [44, 45], I2 = [49, 50], I10 = [67, 68], L1 = [−14~−13], L2 = [46~47, 55~59], |
| | L3 = [−59~−58, 12~13, 34~36, 40~41], L4 = [−38~−35, −19~−19, 86~89] |
| Struc1786 | M = [−32, −27, 0, 18, 45, 57, 54, 67, 70, 86, 89], W = [−36, −33, −28, −9, −8, −6, 7, 28, 44, 84], I3 = [26, 27], L2 = [49~50, 75~76], L4 = [−24~−24, −19~−19], |
| | L5 = [30~33] |
| Struc1787 | M = [−89, −86, −43, −36, −7, −5, 14, 21, 46], W = [−94, −93, −71, −68, −49, −26, −19, 5, 8, 33, 44, 45], L2 = [−57~−56, −18~−17, −2~−1], L5 = [−82~−78] |
| Struc1788 | M = [−39, −35, −33, −20, −4, −1, 12, 16, 19, 42, 64], W = [−22, −40, −38, −18, 25, 36, 50, 53, 54, 56, 75], D = [3], L2 = [−16~−15, 6~7, 29~30, 60~61, 69~70] |
| Struc1789 | M = [−90, −59, −42, −36, −32, −21, −1, 26, 28, 64, 83], W = [−85, −76, −72, −68, −67, −60, −58, −38, −13, −5, −4, 49], D = [57, 58], I4 = [−82, −81], I10 = [−78, −77], |
| | I15 = [−77, −76], L2 = [−66~−65, 61~62], L4 = [−96~−95], L6 = [32~33], |
| | L7 = [−86~−86], L9 = [74~75] |
| Struc1790 | M = [−95, −77, −49, −39, −26, −19, 0, 3, 9, 46, 48, 80, 86, 89, 99], W = [−97, −93, −70, −40, −32, −20, −7, 2, 22, 37, 60, 61], I1 = [71, 72], L1 = [−84~−81], |
| | L2 = [−14~−13, 24~25], L4 = [−89~−89] |
| Struc1791 | M = [−63, −59, −26, −23, 20, 29, 65, 67, 72, 78], W = [−66, −53, −43, −12, −11, −10, 5, 19, 44, 45, 52, 55, 91], D = [58, 59, 60, 61], I1 = [51, 52], L2 = [−17~−16, 83~84], |
| | L5 = [−4~0] |
| Struc1792 | M = [−97, −86, −79, −26, −16, 17, 39, 53, 56, 59], W = [−98, −90, −82, −38, −27, 42, 43, 45, 52, 54], |
| | D = [−69, −68, −67, −66, −65, −64, −63, −62, −61, −60, −59, −58, −57, −56, −53, −1, 0, 41], L2 = [−49~−46, 12~13], L3 = [−36~−34], L7 = [28~32] |
| Struc1793 | M = [10, 50, 65], W = [−75, −50, −35, −26, −23, −13, 11, 30, 48, 52, 53, 60, 77, 90], I9 = [41, 42], L2 = [−32~−31, −22~−21, −2~−1, 13~18], L3 = [−15~−15], L7 = [−71~−70] |
| Struc1794 | M = [−7, 0, 48, 61, 71, 98], W = [−2, 1, 3, 41, 49, 57, 58, 69, 72, 86, 94, 96], D = [14], I4 = [3, 4], I1 = [15, 16], I2 = [36, 37], L1 = [39~40], L2 = [31~34, 76~77], |
| | L3 = [43~44], L7 = [51~52] |
| Struc1795 | M = [−91, −78, −29, −10, 17, 41, 87, 90, 96, 99], W = [−86, −66, −62, −36, −19, −17, 9, 10, 25, 27, 29, 69, 70], D = [34, 35, 36, 53, 54], I3 = [−53, −52], I5 = [−39, −38], |
| | I1 = [−22, −21], I1 = [−20, −19], L1 = [−26~−24], L2 = [−61~−60, −47~−46, −2~−1], L4 = |
| | [27~28], L5 = [6~7, 57~60], L6 = [−73~−68] |
| Struc1796 | M = [−45, −37, −30, −4, −1, 14, 51, 64, 85], W = [−41, −40, −39, −25, −11, −8, 9, 13, 15, 36, 56, 86, 87], D = [3, 42], I2 = [68, 69], L2 = [6~7, 60~61], |
| | L3 = [45~47, 74~76], L4 = [19~22] |
| Struc1797 | M = [−93, −89, −85, −75, −62, −37, −26, −8, 23, 37, 44, 65, 80, 97], W = [−70, −69, −63, −56, −32, −31, −13, −4, 2, 6, 22, 35, 49, 60, 90, 100], I12 = [−82, −81], |
| | L2 = [−15~−14, 10~11], L3 = [−97~−97], L4 = [86~89] |
| Struc1798 | M = [86, −70, −58, −43, −35, −1, −5, −1, 1, 21, 46], W = [−71, 68, −26, −25, −19, −18, 5, 8, 44], L2 = [28~29, 36~37], L4 = [−81~−78] |
| Struc1799 | M = [−97, −93, −89, −78, −76, −60, −49, −26, −8, 25, 44, 74, 50], W = [−98, −70, −53, −40, −32, −20, 2, 22, 57, 100], L1 = [−84~−81], L2 = [−39~−38], L4 = [86~89] |
| Struc1800 | M = [−42, −28, 4, 12, 41, 55], W = [−38, 14, 59, 84, 93, 100], D = [−11], I1 = [−13, −12], I2 = [99, 100], L1 = [−25~−21, 89~90], L2 = [30~31, 60~61], L3 = [−2~0] |
| Struc1801 | M = [−83, −80, −73, −55, 24, 42, 47], W = [−97, −84, −81, −70, −38, −25, −19, 14, 16, 17, 52], D = [12], I1 = [−46, −45], I1 = [7, 8], L8 = [−41~−40], L1 = [−6~−5, −1~0], |
| | L3 = [53~54], L5 = [−61~−61, −34~−30] |
| Struc1802 | M = [15, 17, 43, 76, 85, 96], W = [6, 7, 25, 30, 44, 45, 49, 51, 73, 79, 90], L2 = [31~32], L3 = [−2~0, 60~64], L4 = [67~68] |
| Struc1803 | M = [ −79, −54, −51, −16, −13, −7, 8, 12, 16, 25], W = [−92, −88, −46, −30, −28, −22, −9, 7, 20, 61, 62], D = [−1, 0, 53, 54, 55, 56, 57, 58], I8 = [−57, −56], |
| | L2 = [−36~−35, −24~−23, 45~46], L3 = [−70~−68] |
| Struc1804 | M = [0, 43, 46, 61, 65, 68, 90, 98], W = [1, 36, 49, 57, 69, 78, 94, 96], D = [14], I4 = [4, 5], I1 = [15, 16], I3 = [29, 30], L2 = [−7~−6, 71~72, 76~77], L3 = [50~52], |
| | L6 = [32~34] |
| Struc1805 | M = [−79, −61, −43, −37, −19, 0, 3, 25, 30, 53, 60, 94], W = [−59, −39, −27, −15, −14, −9, −8, 19, 37, 46, 56, 59, 91, 99], I2 = [70, 11], L2 = [47~48, 89~90], L7 = [86~87] |
| Struc1806 | M = [−4, 17, 34, 41, 47, 70, 83, 97], W = [8, 9, 49, 71, 78, 80, 92, 100], D = [3], I1 = [80, 81], L2 = [12~13], L3 = [64~66], L4 = [0~0] |
| Struc1807 | M = [−40, −32, 0, 40, 59], W = [−70, −52, −38, −7, 2, 5, 16, 60, 66], D = [44, 45, 46, 47], I15 = [4, 5], I2 = [5, 6], I15 = [7, 8], I3 = [66, 67], L2 = [−37~−36, 90~91], |
| | L3 = [−68~−66, 54~56] |
| Struc1808 | M = [−98, −63, −56, −46, −40, −4, 34, 42, 57, 89, 95], W = [−65, −48, −47, −32, −31, −7, −2, 2, 9, 14, 33, 35, 41, 56, 87, 92], L1 = [−86~−79, −17~−14, 78~81], |
| | L2 = [−95~−94, −52~−51, 25~28, 65~66] |
| Struc1809 | M = [−64, −62, −17, −14, 21], W = [−74, −66, −65, −42, −2, 13, 16, 39, 48, 51, 68, 73, 74], D = [−78, −77], I2 = [−74, −73], I1 = [−25, −24], L1 = [−34~−33, −29~−28] |
| Struc1810 | M = [−25, −13, −8, 0, 3, 5, 8, 13, 23, 64, 73, 63], W = [−74, −73, −71, −68, −62, −60, −58, −57, −27, −19, 6, 14, 16, 22, 24, 26, 31, 48, 54, 66, 69, 80, 82], I2 = [31, 32], |
| | L2 = [−51~−50, −18~−17], L3 = [92~94], L4 = [−56~−63] |
| Struc1811 | M = [−66, −52, −18, −6, 0, 5], W = [−92, −87, −84, −73, −57, −38, −17, 7, 8, 13, 16, 20, 27], I15 = [−92, −91], I4 = [19, 20], L5 = [−96~−95] |
| Struc1812 | M = [−43, −18, 0, 10, 18, 22, 25, 32, 41, 51], W = [−38, −21, −14, 3, 40, 49], D = [−36, −35, −34], L3 = [−30~−28] |
| Struc1813 | M = [−71, −62, −33, −30, −6, 0, 9, 11, 33, 39, 91], W = [−88, −16, −15, −9, −8, 8, 36, 45, 72, 79, 87, 88], D = [60], I10 = [−88, −87], I1 = [61, 62], L2 = [55~56], |
| | L3 = [−79~−77, −41~−39] |
| Struc1814 | M = [−51, −23, 3, 9, 69, 74, 77], W = [−61, −41, −30, −6, 10, 28, 40, 67, 96, 100], D = [56, 62], L1 = [80~82, 88~92], L2 = [−65~−64, −49~−48, −29~−28], L5 = [31~35] |
| Struc1815 | M = [−28, 5, 29, 73, 86, 90], W = [−87, −85, −83, −78, −75, −73, −71, −68, −67, −65, −63, −12, 26, 44, 45, 57, 66, 69, 77, 80, 81, 94], D = [−19, −2, 67, 68], |
| | I5 = [−83, −82], I1 = [−70, −69], I12 = [−65, −64], I13 = [−58, −57], I12 = [−55, −54], I4 = [−51, −50], |
| | I13 = [−41, −40], I10 = [−38, −37], I1 = [−22, −21], L2 = [−60~−59, 32~33], L3 = [12~14, 96~99] |
| Struc1816 | M = [−51, −49, −41, 0, 9, 25, 49, 53, 59, 63], W = [−61, −60, −58, −57, −53, −50, −39, 5, 14, 34, 35, 57, 64, 65, 89], L1 = [−16~−14], L2 = [−65~−64], L5 = [−8~−6, 28~32] |
| Struc1817 | M = [−40, −19, −16, −11, −9, 4, 12, 23, 41, 56, 73, 79, 88], W = [−26, 33, 52, 60, 66, 76, 99], I1 = [−5, −4], I1 = [42, 43], L2 = [−43~−43, 64~65], L3 = [6~8], |
| | L4 = [−51~−48, 35~36] |
| Struc1818 | M = [−86, −82, −55, −35, −11, 12, 22, 26, 79, 84], W = [−79, −78, −75, −67, −53, −22, −2, 23, 35, 56, 68, 76, 80, 81], D = [−66, −65, −64, −63, −62, 15, 16, 45], |
| | I1 = [−43, −42], I1 = [−13, −12], I1 = [3, 4], L2 = [−50~−47, 91~92], L3 = [5~7, 65~67], |
| | L5 = [57~61], L6 = [−19~−15] |
| Struc1819 | M = [5, 12, 89], W = [−63, −62, −58, −53, −48, −46, −42, −36, −35, −32, −29, −24, −15, 6, 16, 17, 20, 22, 23, 26, 45, 55, 58, 65, 93, 96], I9 = [−9, −8], I2 = [44, 45], |
| | I4 = [64, 65], I15 = [84, 85], L1 = [−57~−56], L2 = [−14~−13, 81~82, 91~92], |
| | L3 = [−18~−18, −2~0], L4 = [−40~−39, −34~−34, 68~69], L5 = [−25~−25, 75~79], L7 = [−28~−28], L14 = [71~72], L15 = [−50~−49] |
| Struc1820 | M = [−97, −95, −74, −65, −52, −50, −35, −29, −19, −7, 62, 73, 91, 94], W = [−80, −56, −46, −27, −26, −16, −12, 5, 38, 41, 50, 57, 70, 90], D = [27], I2 = [−42, −41], |
| | L2 = [−85~−84, 39~40, 46~47] |
| Struc1821 | M = [−67, −62, −42, −19, −9, 21, 58, 83], W = [−76, −45, −4, −2, 14, 56], D = [−89, −44, −37, −36, −35, −34, −33, −32, −31, −30, −29, 36, 37, 38, 39, 40], |
| | I1 = [−92, −91], I1 = [50, 51], L2 = [−57~−51] |
| Struc1822 | M = [−74, −56, −42, −29, −18, −13, −6, 0, 12, 19, 33, 35, 42, 53, 58, 93, 98], W = [−91, −85, −82, −79, −41, −24, −23, −17, −11, 16, 26, 30, 31, 55, 75, 90], D = [−45], |
| | I1 = [−87, −86], I1 = [26, 27], I1 = [39, 40], I10 = [89, 90], L2 = [−81~−80, −68~−64, 64~65], |
| | L3 = [−51~−49], L4 = [5~8] |
| Struc1823 | M = [−63, −57, −19, −16, 0, 15, 19, 56, 72, 82], W = [−95, −93, −70, −65, −52, −17, −5, 2, 32, 50, 60, 65, 85], D = [59, 68], I15 = [−80, −79], I6 = [−72, −71], |
| | I15 = [−68, −67], I10 = [−67, −66], L2 = [35~36, 89~90], L3 = [−85~−85], L4 = [93~96], |
| | L6 = [−75~−75], L12 = [−41~−32] |
| Struc1824 | M = [47, 49, 70, 91], W = [−97, −96, −68, −54, −44, −40, −7, −6, 27, 33, 46], D = [19, 94], I12 = [−72, −71], I11 = [−70, −69], I8 = [−66, −65], I14 = [−62, −61], |
| | I14 = [−60, −59], I3 = [−48, −47], I8 = [−45, −44], I14 = [−41, 40], I14 = [−35, −34], |
| | I1 = [25, 26], I1 = [95, 96], L9 = [−55~−55], L3 = [−51~−51], L4 = [−89~−85, 40~43], L5 = [−33~−33] |
| Struc1825 | M = [−66, −28, −14, −10, 14, 65], W = [−81, −7, −49, −40, −29, −19, 16, 17, 2, 32, 52, 57, 68, 69, 7, 80], D = [−18, 6, 90, 91], I1 = [−22, −2], I1 = [4, 5], I3 = [31, 32], |
| | L9 = [−75~−70], L2 = [−2~0, 25~27], L3 = [−59~−57], L4 = [−43~−42] |
| Struc1826 | M = [−49, −35, −5, 0, 7, 34, 36, 69], W = [−57, −50, −44, −16, −12, −11, −2, 6, 24, 25, 35, 55, 65, 68, 80, 96], D = [−43, −42, −41, −40, −39, 86], I1 = [50, 51], |
| | I15 = [73, 74], I15 = [74, 75], L2 = [−70~−69, −60~−59, 60~61], L3 = [−64~−63], |
| | L4 = [88~91], L11 = [43~46], L13 = [70~72] |
| Struc1827 | M = [−45, −38, 0, 13], W = [−61, −60, −55, −53, −41, −28, −8, 4, 11, 12, 43, 58, 68, 71], D = [−85, −52, −51, 17, 36, 37, 38], I1 = [9, 10], I1 = [82, 83], L1 = [−5~−4], |
| | L2 = [−95~−93, −19~−18, 29~30, 73~74], L3 = [−79~−77, −48~−48, −10~−9, 26~27] |
| Struc1828 | M = [−6, 0, 14, 57, 61, 69, 86], W = [−30, −27, −24, −23, −21, −17, −14, −13, 9, 21, 23, 24, 38, 45, 66, 68, 79, 96], D = [76], L2 = [34~35, 93~94], L3 = [30~31, 40~42] |
| Struc1829 | M = [−97, −92, −51, −49, −43, −37, −22, −18, −12, 0, 7, 15, 38, 61, 67, 70, 81, 87, 93], W = [−93, −76, −47, −38, −25, 5, 28, 29, 41, 86], D = [−29, 24, 26], I4 = [−68, −67], |
| | I2 = [−26, −25], L1 = [−33~−32], L2 = [−6~−5, 42~43, 52~53], L3 = [−57~−55, 30~31] |
| Struc1830 | M = [−96, −89, −73, −33, −14, −7, 0], W = [−93, −66, −59, −50, −49, −45, −27, −19, −12, −5, 2, 9], I3 = [−25, −24], I1 = [−23, −22], L6 = [−69~−69] |
| Struc1831 | M = [−97, −78, −57, −54, −51, −33, −31, −25, −22, −5, 0, 7, 19, 29, 31, 35, 39, 54, 62, 73, 88, 97], W = [−86, −79, −62, −50, −38, −26, 17, 26, 42, 43, 47, 18, 89], |
| | I10 = [−93, −92], L2 = [−90~−89, −85~−83, −68~−67], L5 = [−16~−12] |
| Struc1832 | M = [−51, −37, −9, 23, 41, 66], W = [−61, −47, −4, 7, 33, 52, 60, 61, 76, 77, 87, 99], D = [89], I2 = [−16, −15], I3 = [35, 36], I1 = [42, 43], L2 = [−23~−20, 78~79], |
| | L3 = [−6~−5], L5 = [−43~−40] |
| Struc1833 | M = [−91, −89, −56, −22, −14, −9, −4, 40, 45, 60], W = [−99, −94, −88, −84, −59, −27, −10, 56, 67, 71, 90, 91], D = [−40, −39], L2 = [3~4, 48~49], L4 = [−78~−73, −33~−33], |
| | L6 = [32~37] |
| Struc1834 | M = [−57, −3, 0, 28, 75, 92], W = [−94, −68, −20, −14, 7, 36, 62, 69, 89], D = [−16, 34], I1 = [−15, −14], I1 = [37, 38], L2 = [−42~−41, 39~40, 70~71], L3 = [−27~−25], |
| | L4 = [−91~−88, −63~−62], L6 = [85~86] |
| Struc1835 | M = [−82, −19, −9, −4, −2, 49, 62, 74], W = [−96, −90, −50, −47, −40, −33, 14, 32, 41, 45, 77, 99], D = [−46, −45, −44, −32, −31], I11 = [34, 35], L2 = [65~66], L3 = [54~56] |
| Struc1836 | M = [−84, −68, −35, −10, 0, 29, 37, 58], W = [−93, −92, −85, −83, −66, −65, −28, −7, −6, 3, 6, 12, 16, 28, 54, 63, 72, 73], I8 = [32, 33], I1 = [69, 70], |
| | L1 = [−60~−59, −56~−54], L2 = [−22~−41, −4~−3, 9~11, 65~67], L3 = [−51~−51] |
| Struc1837 | M = [0, 31, 53, 62, 86, 93], W = [−30, −22, −14, −13, 15, 19, 20, 61, 66, 76, 79, 80, 96], D = [−24, −21, −11], I2 = [−29, −28], L2 = [35~40, 57~58] |
| Struc1838 | M = [−42, −19, 1, 19, 23, 37, 68, 81], W = [−53, −50, −30, −29, −18, −17, −12, −5, 2, 33, 47], D = [−46], I1 = [−63, −62], I1 = [90, 91], L2 = [6~7, 53~54], L3 = [−59~−57] |
| Struc1839 | M = [19, 28, 32, 50, 52, 73, 75, 80, 85, 88], W = [−11, 29, 59, 17, 95, 99], D = [−9], I1 = [98, 99], L2 = [−16~−15, −1~0, 35~36, 41~42, 55~56, 82~83] |
| Struc1840 | M = [−92, −87, −3, 0, 15, 31, 36, 38, 87, 89], W = [−76, −62, −56, −31, −27, −5, 5, 16, 26, 27, 39, 41, 75, 96], D = [55, 56, 57, 58], I1 = [43, 44], I1 = [80, 81], |
| | L1 = [77~78], L2 = [−80~−79, −50~−49, −16~−15, 23~24], L4 = [67~70], L6 = [45~47] |
| Struc1841 | M = [−28, −13, 5, 22, 34, 43, 75, 82], W = [−83, −40, −33, 16, 17, 44, 45, 68, 69, 71, 90], D = [−75, −75, −14, −73, −72, −71, −70, −69, −68, −67, −66, −2, 91, 92], |
| | I4 = [−83, −82], I2 = [−41, −40], L2 = [−21~−20, 64~65], L3 = [−59~−57, 12~14] |
| Struc1842 | M = [−97, −63, −9, 1, 20, 23, 46, 56, 86], W = [−98, −64, 39, 47, 53], D = [−21, −20, 30, 31, 32, 69, 70], I1 = [6, 7], L2 = [−86~−85, −66~−65, −55~−54, −42~−41], |
| | L3 = [−31~−29, −17~−17], L4 = [35~36] |
| Struc1843 | M = [4, 19, 31, 41, 50, 52, 67, 87], W = [−10, 42, 59, 81, 88, 90, 91, 95], D = [36, 44, 45, 73], I1 = [27, 28], I2 = [90, 91], L2 = [−16~−15, −12~−11, −1~0, 56~57, 77~80], |
| | L3 = [82~84] |
| Struc1844 | M = [−91, −89, −39, 1, 15, 44, 47, 56, 73], W = [−58, −51, −50, −44, −34, −7, −6, 21, 27, 57, 58, 65, 70], D = [−72, 3], I8 = [77, 78], L2 = [−97~−96, −61~−50, −53~−52], |
| | L3 = [−28~−26], L4 = [33~36] |
| Struc1845 | M = [−14, 0, 7, 24, 39, 50, 63, 79], W = [−3, 20, 25, 29, 31, 32, 36, 73, 71, 91], D = [9, 44], I2 = [69, 70], I3 = [97, 98], L1 = [34~35, 84~89] |
| Struc1846 | M = [−98, −92, −73, −56, −21, −16, −9, 0, 3, 13, 20, 33, 39, 44, 52, 71, 79, 91, 95, 98], W = [−50, −48, −38, −32, −15, −5, 2, 5, 8, 11, 24, 36, 67, 87, 88, 93], D = [−6], |
| | I5 = [−42, −41], I1 = [−12, −11], L2 = [−62~−61, −47~−46, −34~−33, 9~10, 55~56], L4 = [−81~−76] |
| Struc1847 | M = [−88, −86, −70, −49, −35, −26, −16, −5, 0, 7, 43, 45, 8, 93, 99], W = [−9, −97, −94, −82, −80, −76, −72, −65, −62, −3, −32, −28, 31, 38, 73, 75, 83], |
| | D = [25, 29, 63, 64, 65, 66], I8 = [−76, −75], I1 = [−62, −61], I2 = [32, 33], L2 = [−96~−95, 55~57], |
| | L3 = [−58~−56] |
| Struc1848 | M = [−97, −65, −42, −31, −17, 1, 6, 36, 54, 57, 76, 85], W = [−98, 81, 98], D = [66, 67], L3 = [−55~−53, −22~−20, 30~32], L4 = [20~23] |
| Struc1849 | M = [−77, −33, −19, −16, −9, −5, 50, 60, 83, 90], W = [−86, −84, −74, −56, −4, 6, 43, 51, 61, 63], D = [38, 39, 40, 41, 14], I2 = [−31, −30], L2 = [−47~−46, −38~−37, 77~78], |
| | L3 = [8~10, 27~29] |
| Struc1850 | M = [−54, 3, 14, 20, 44, 63, 80, 85, 93], W = [−70, −51, −28, −19, −5, −2, 24, 28, 45, 53, 69, 71, 72], D = [−65, −64, −4, −3, 30, 31], I1 = [−62, −61], I1 = [−58, −57], |
| | I10 = [−18, −17], I1 = [41, 42], L2 = [−14~−73, 38~39, 76~77], L3 = [−88~−86], |
| | L4 = [−82~−79, −31~−30], L5 = [−44~−40], L8 = [−22~−20] |
| Struc1851 | M = [−38, −36, 1, 9, 11, 27, 34, 40], W = [−94, −87, −81, −39, −29, −15, −7, 19, 68, 14, 80], D = [−96], I1 = [61, 62], L1 = [−73~−67, −62~−49, −17~−16], L2 = [68~69] |
| Struc1852 | M = [−92, −58, −41, −28, −23, 32, 34, 46, 74, 8, 92], W = [−63, −61, −60, −27, −6, 10, 11, 28, 36, 40, 66, 89, 96, 100], I1 = [−71, −70], L1 = [80~83], L2 = [−65~−64, −3~−3], |
| | L5 = [−52~−48] |
| Struc1853 | M = [−64, −61, −59, −49, −46, −19, 1, 16, 21, 31, 44, 57, 67, 74, 81], W = [−55, −42, 2, 12, 13, 22, 23, 33, 39, 63, 68, 76, 79], D = [87, 88, 92, 93, 94, 95, 96], |
| | I1 = [79, 80], L1 = [−69~−68], L2 = [−41~−40, −30~−29, −12~−11, 64~65] |
| Struc1854 | M = [−56, −52, −30, 0, 30, 37, 56, 75, 86, 96], W = [−93, −91, −90, −69, −57, −32, −21, −7, 6, 7, 17, 45, 67, 68, 78, 83, 85, 92, 93], D = [−62, −61, −60], I9 = [−69, −68], |
| | I4 = [−22, −21], L1 = [−16~−12], L2 = [−98~−95, 62~63, 79~80], L3 = [69~71], |
| | L4 = [−35~−34] |
| Struc1855 | M = [−94, −7], W = [−93, −59, −50, −49, −37, −25, −22, −19, −12, −5, 4, 9, 10], I4 = [−23, −22], I1 = [−3, −2], L8 = [−69~−67], L2 = [−41~−40, 0~1, 20~21] |
| Struc1856 | M = [−89, −85, −40, −20, −10, −7, 5, 15, 29, 35, 40, 46, 58, 84], W = [−91, −69, −49, −44, 16, 20, 25, 67, 79, 86, 97, 99], I1 = [−52, −51], I2 = [−49, −48], |
| | L1 = [−72~−71, 62~63, 89~92], L2 = [−97~−96, −94~−93, −29~−28, −16~−15, 10~11], L3 = [−1~−1, 97~98], L4 = |
| | [68~70] |
| Struc1857 | M = [−96, −52, −47, 0, 2, 8, 32], W = [−91, −57, −54, −51, −32, −15, −9, 29, 31, 47, 49, 55, 59], D = [−8, −7, −6, −5], I10 = [−78, −77], I15 = [−63, −62], |
| | I14 = [−62, −61], I2 = [−54, −53], I2 = [−40, −39], I1 = [−37, −36], I14 = [24, 45], I2 = [48, 49], L2 = |
| | [−23~−16, 25~26], L13 = [−84~−83], L7 = [−58~−58] |
| Struc1858 | M = [−24, −1, 7, 27, 31, 57, 65, 67], W = [8, 96], L1 = [50~52], L2 = [45~46], L4 = [71~74], L5 = [−14~−8] |
| Struc1859 | M = [−91, −61, −58, −50, −46, −41, −38, 4, 7, 15, 27, 54, 63, 66], W = [−93, −53, −52, −49, −39, −29, −16, 3, 6, 26, 35, 40, 57], L2 = [−55~−64, −7~−6, −4~−3, 33~34], |
| | L3 = [−77~−76, −20~−18] |
| Struc1860 | M = [−76, −54, −36, −28, 50, 65, 68, 85], W = [−88, −83, −75, −63, −40, −32, −25, −18, −12, 10, 22, 23, 26, 31, 44, 53, 57, 80, 81, 92], D = [−19, −2, 93, 94, 95], |
| | I1 = [−85, −84], I2 = [−42, −41], I1 = [−22, −21], I1 = [79, 80], L2 = [−14~−13], L3 = [−59~−57], |
| | L4 = [4~7, 12~15], L6 = [−72~−66] |
| Struc1861 | M = [−83, −78, −67, −58, −55, −51, −43, −33, −15, −12, −6, −5, 7, 19, 35, 42, 91], W = [−38, −26, −25, 38, 47, 49, 52, 53, 57, 72, 79, 85, 93, 100], I2 = [49, 50], |
| | I15 = [57, 58], I11 = [61, 62], I14 = [63, 64], I12 = [78, 79], I14 = [80, 81], I11 = [88, 89], I15 = |
| | [94, 95], I5 = [97, 98], I1 = [99, 100], L2 = [0~1, 28~29], L3 = [−85~−85, 69~71], L14 = [83~84] |
| Struc1862 | M = [−55, −38, −10, 15, 29, 35], W = [−91, −89, −79, −65, −64, −54, −44, −18, −11, −8, −6, −2, 3, 10, 11, 12, 16, 20, 27, 28, 33, 34, 36, 40, 63, 65], |
| | D = [−88, −87, −86, −85, −84, −83, −82, −81, −80, 4, 5, 6], I3 = [11, 12], I2 = [61, 62], I2 = [64, 65], I1 = [66, 67], |
| | I10 = [75, 76], L2 = [−96~−95, −62~−60, −16~−15, −1~0, 57~58, 69~70, 97~98], L4 = [−50~−47], L13 = [77~85], L7 = [45~47] |
| Struc1863 | M = [−98, −67, −63, −57, −55, −10, −5, 35, 68, 80, 82, 94], W = [−76, −71, −70, −65, −33, −31, −17, −9, −8, 23, 24, 43, 65, 72, 85], |
| | D = [−64, 47, 46, 49, 50, 51, 52, 53, 54, 55, 56, 57, 58], I1 = [−95, −94], I2 = [43, 44], I1 = [96, 97], |
| | L2 = [−91~−89, −79~−78, −16~−15, 0~1, 10~11, 89~90], L3 = [−38~−36] |
| Struc1864 | M = [−57, −40, −32, −29, −21, 35, 37, 55, 62, 82, 97], W = [−71, −70, −17, −16, −9, −8, −5, 23, 24, 50, 59, 60, 65, 85, 88, 100], D = [−84, 74], I1 = [−9, −8], |
| | I5 = [65, 67], L2 = [−63~−62], L3 = [−38~−36, −1~1, 88~90], L4 = [45~48], L5 = [−79~−78] |
| Struc1865 | M = [−63, −33, 8, 28, 36, 57, 62, 83], W = [−92, −73, −41, −32, −30, −22, −12, −6, 27, 39, 55, 64, 70, 77, 100], I3 = [0, 1], I1 = [3, 4], I1 = [69, 70], L1 = [−38~−37], |
| | L2 = [−88~−87, −17~−16, 22~23, 86~87], L3 = [41~43], L4 = [−80~−77], L8 = [−57~−50] |
| Struc1866 | M = [−78, 0, 20, 24], W = [−93, −64, −59, −57, −50, −49, −27, −25, −22, −19, −12, −5, 2, 4, 9, 10], I4 = [−23, −22], I1 = [−3, −2], L2 = [−84~−83, −41~−40], |
| | L6 = [−69~−69] |
| Struc1867 | M = [−55, −50, −44, −35, 1, 24, 45, 58, 83], W = [−53, −48, −15, −2, 12, 14, 56, 68], D = [−68, −67, −66, −65, −64, −63, −62, 5, 6, 7, 8, 9, 10, 11, 15], I8 = [26, 27], |
| | L1 = [−19~−18], L2 = [−14~−14, 19~20], L3 = [−11~−11], L4 = [64~67, 91~94] |
| Struc1868 | M = [−59, −44, −29, −23], W = [−98, −74, −71, −67, −35, −32, −30, 12, 22], I1 = [−8, −7], I11 = [18, 19], L2 = [−70~−69, −48~−47, 9~10], L3 = [0~2] |
| Struc1869 | M = [−92, −77, −66, −53, −40, −38, −27, −3, 1, 14, 23, 43, 49, 83, 96], W = [−88, −49, −48, −32, −25, −17, −16, 18, 41, 42, 45, 46, 53, 54, 77, 78], L2 = [56~57, 90~91], |
| | L3 = [7~9, 29~31], L4 = [64~67] |
| Struc1870 | M = [−95, −77, −44, −37, −27, −13, −1, 36, 39, 97], W = [−86, −66, −49, −45, −36, −7, −6, 40, 91, 99], D = [−50, 88], L1 = [2~3], |
| | L2 = [−72~−71, −55~−54, −5~−4, 12~13, 20~21, 48~49, 55~56], L5 = [80~84], L6 = [−61~−57] |
| Struc1871 | M = [−82, −51, −33, −22, −15, −12, 0, 7, 19, 62, 71, 73, 79, 88, 97], W = [−62, −50, −42, −41, −38, 10, 26, 47, 14, 77, 78, 93], D = [29], I4 = [26, 27], L1 = [53~54], |
| | L2 = [−67~−66, −56~−55, 35~39], L11 = [−89~−85], L7 = [−79~−78] |
| Struc1872 | M = [−27, −22, 0, 58, 61], W = [−3, 2, 19, 52, 67], D = [87], I2 = [29, 30], L8 = [36~38], L2 = [14~15] |
| Struc1873 | M = [−12, −7, 0, 11, 19, 29, 35, 38, 43, 74, 76, 81, 85, 96], W = [−41, −39, −37, −35, −31, −29, −25, −24, 13, 14, 31, 33, 41, 54, 89, 98], I4 = [−32, −31], L3 = [61~63] |
| Struc1874 | M = [−52, −37, −29, −23, 2, 12, 28, 30, 37], W = [−98, −92, −91, −64, −63, −60, −51, −47, −38, −28, −27, −5, −1, 24, 27, 32, 36, 44, 57], D = [−70, 7], I9 = [−79, −78], |
| | I1 = [−11, −10], L2 = [−94~−93, −49~−48], L6 = [66~71] |
| Struc1875 | M = [−95, −91, −71, −67, −51, −38, −6, −3, −1, 8, 26, 58, 97], W = [−68, −62, −43, −31, −14, −13, 5, 21, 25, 44, 46, 52, 55, 82, 99], I1 = [−99, −98], I2 = [−65, −64], |
| | L1 = [−60~−57, 72~73], L2 = [61~62], L3 = [79~81], L4 = [35~38, 47~50] |
| Struc1876 | M = [−76, −64, −50, 20, 26], W = [−84, −82, −79, −74, −73, −71, −65, −41, −37, −24, −18, −10, −4], D = [1], I1 = [−2, −1], L9 = [−35~−27], L2 = [−56~−55] |
| Struc1877 | M = [−95, −89, −75, −62, −59, −56, −50, 4, 28, 31, 45, 49, 59, 70, 74], W = [−80, −64, −63, −60, −52, −51, −48, −6, 5, 12, 54, 81, 82], |
| | D = [34, 35, 36, 37, 38, 39, 40, 41, 88, 89], I3 = [−79, −78], L2 = [10~11, 64~65], L3 = [−30~−28] |
| Struc1878 | M = [−89, −59, −56, −28, −13, −6, 2, 16, 36, 4, 53, 58, 66], W = [−64 −53, −47, −40, −23, −5, 5, 11, 19, 35, 52, 93, 95, 96], |
| | D = [−80, −79, −78, −77, −76, −75, −74, −73, −72, −71], L1 = [−52~−50], L3 = [−46~−46] |
| Struc1879 | M = [−78, −50, −15, 0, 17, 28], W = [−52, −51, −49, −41, −33, −6, −5, 5, 27, 57, 62, 75], D = [4, 34, 35, 36, 37, 38, 39, 40, 41, 83, 84], I1 = [−91, −90], |
| | L1 = [−64~−63, 45~47], L2 = [−60~−60], L3 = [−29~−27, 58~61] |
| Struc1880 | M = [−9, 1, 7, 30, 41, 77], W = [−95, −85, −61, −57, −6, −5, 4, 5, 17, 24, 28, 31, 51, 57, 95], D = [21], I15 = [−99, −98], I15 = [−98, −97], I8 = [−97, −96], |
| | I14 = [−88, −87], I15 = [−78, −77], I1 = [−77, −76], I15 = [−76, −75], I15 = [−70, −69], I15 = [−60, −59], |
| | I15 = [−59, −58], I11 = [−58, −57], I2 = [−24, −23], I1 = [19, 20], I1 = [37, 38], I4 = [71, 72], I2 = [86, 87], L1 = [66~68], |
| | L2 = [−65~−64, −52~−51, −41~−40, 11~12, 15~16, 62~63], L3 = [−15~−13, 34~36], L9 = [−84~−83], L15 = [−93~−93] |
| Struc1881 | M = [−19, −13, 7, 14, 42, 52, 79], W = [−73, −68, −61, −40, −16, −15, −14, −9, −6, −5, 2, 8, 58, 59, 83], L2 = [−69, −68], I2 = [−47, −46], I2 = [66, 67], |
| | L2 = [−56~−55, −24~−24, 69~70], L3 = [−50~−49, −31~−28], L5 = [34~38] |
| Struc1882 | M = [−86, −75, −67, −58, −37, −28, −11, −3, −1, 3, 11, 79], W = [−97, −88, −87, −84, −77, −68, −31, −30, 5, 21, 52, 55, 99], D = [−90], I2 = [45, 46], I15 = [73, 74], |
| | I1 = [81, 82], L1 = [48~50], L2 = [−61~−60, −8~−7, 96~97], L3 = [−53~−51, 24~26, 36~38], L13 = |
| | [65~68] |
| Struc1883 | M = [−90, −36, −71, −51, −37, 4, 26, 41, 58, 62, 69, 73, 79, 97], W = [−99, −77, −76, −34, −22, −14, 9, 21, 44, 46, 55, 88, 89, 92, 99], D = [−94, −8, −7], |
| | I10 = [−99, −98], I2 = [−57, −56], I1 = [51, 82], L1 = [−61~−59], L2 = [−68~−67], L3 = [36~38], |
| | L4 = [−3~−1], L5 = [48~52] |
| Struc1884 | M = [−38, 12, 21, 23, 26, 49], W = [−88, −78, −77, −67, −48, −47, −41, −40, −28, −9, −3, 4, 9, 11, 37, 38, 57, 58, 92, 96], D = [−58, −52, −51, −50, −23, −22], |
| | I4 = [−68, −67], I1 = [−62, −61], I2 = [−28, −27], L2 = [−83~−82, 35~36, 71~72], L3 = [52~54] |
| Struc1885 | M = [−23, −1, 7, 24, 28, 34], W = [−42, −26, −19, −11, −7, −6, 5, 10, 11, 27, 47, 64], D = [−74, −73, 65, 66], I13 = [37, 38], I1 = [45, 46], I15 = [46, 47], |
| | I14 = [81, 82], L2 = [−71~−70, −51~−50, −4~−3, 95~99], L3 = [−14~−12, 71~73], L4 = [−62~−59], |
| | L5 = [−31~−28], L7 = [41~42], L9 = [54~61] |
| Struc1886 | M = [−37, −31, −23, −17, 3, 7, 24, 28, 34, 67, 95, 99], W = [−42, −35, −30, −26, −19, −11, −10, 5, 10, 11, 27, 64, 97], D = [65, 66], I2 = [−73, −72], I1 = [−28, −27], |
| | I1 = [−9, −8], I13 = [37, 38], I14 = [81, 82], L2 = [−51~−50, −14~−12, −4~−3, 53~54], |
| | L3 = [−68~−56, 41~43, 71~73], L4 = [−62~−59], L5 = [49~50], L9 = [59~61], L13 = [45~46] |
| Struc1887 | M = [−92, −39, −15, 17, 23, 34, 36, 44, 61, 68, 72], W = [−60, −38, −28, −22, −19, −8, −6, 2, 4, 10, 28, 29, 35, 46, 74, 95], D = [−70], L1 = [57~58], |
| | L3 = [−51~−49, 36~87], L4 = [11~14, 93~94] |
| Struc1888 | M = [−21, −17, −13, −9, 1, 4, 9, 52, 59, 81, 92, 97], W = [−4, −3, 10, 17, 21, 31, 70, 91], D = [76, 77, 78], I11 = [38, 39] |
| Struc1889 | M = [−44, −37, 1, 14], W = [−60, −59, −54, −52, −40, −27, −7, 5, 12, 13, 44, 59, 69, 72], D = [−84, −51, −50, 18, 37, 38, 39], I1 = [10, 11], I1 = [83, 84], |
| | L1 = [−4~−3], L2 = [−94~−92, −18~−17, 30~31, 74~75], L3 = [−78~−76, −47~−47, −9~−8, 27~28] |
| Struc1890 | M = [−98, −85, −81, −60, −46, −38, −25, −9, −6, 1, 12, 27, 30, 44, 67], W = [−62, −59, −57, −50, −49, −25, −24, 4, 5, 11, 24, 31, 54, 66, 72], I9 = [−69, −68], |
| | I15 = [−62, −61], I1 = [−54, −53], L1 = [−32~−31], L2 = [−89~−88, 74~75], L3 = [−75~−73], |
| | L4 = [−12~−12, 34~37], L5 = [82~83] |
| Struc1891 | M = [−58, −34, −24, −21, 1, 3, 7, 10, 27, 36], W = [−99, −88, −86, −72, −8, −7, 42, 47], D = [−92, −91, −90, −89, −83, −12, 50], I1 = [−79, −78], I1 = [−71, −70], |
| | I1 = [−69, −68], I1 = [−15, −14], I8 = [59, 60], L2 = [−66~−65, −40~−39], L5 = [−76~−74] |
| Struc1892 | M = [−91, −68, −59, −47, −18, −10, 3, 10, 20, 24, 38, 53, 58, 73], W = [−34, −27, 28, 29, 41, 57, 70], D = [−98, −64], L1 = [−79~−77], |
| | L2 = [−95~−95, −61~−61, −51~−50, −6~−5, 34~35, 61~62], L3 = [65~67] |
| Struc1893 | M = [−97, −75, −56, −50, −34, −9, −6, 1, 6, 46, 65, 18, 96], W = [−92, −89, −68, −49, −46, −22, −21, 9, 17, 19, 32, 41, 45, 90], D = [−27], I8 = [−92, −91], |
| | I4 = [−80, −19], I1 = [−40, −39], I2 = [−24, −23], I1 = [56, 57], I2 = [83, 84], I2 = [87, 88], |
| | L2 = [−20~−19, −16~−14, 10~11, 33~34], L3 = [−83~−83, 28~30], L4 = [−64~−61], L5 = [70~74] |
| Struc1894 | M = [−95, −88, −84, −67, −40, −9, −5, 1, 12, 38, 46, 52, 57, 61], W = [−64, −63, −48, −47, −39, −33, −6, 4, 5, 10, 31, 36, 63, 65, 67, 69], |
| | D = [−71, −52, −51, 72, 73, 74, 76], I1 = [−46, −45], I1 = [−44, −43], I8 = [62, 63], L2 = [34~35], L3 = [−61~−59], |
| | L4 = [−28~−25] |
| Struc1895 | M = [−79, −75, −70, −33, −9, 0, 3, 14, 21, 43, 46, 65], W = [−60, −53, −16, −15, −3, 11, 16, 17, 49], L2 = [−89~−87, −58~−57, 68~69], L3 = [−68~−66] |
| Struc1896 | M = [−40, −28, −18, −15, −5, 1, 4, 20, 30, 53, 58, 60], W = [−50, −26, −25, 7, 17, 19, 26, 29, 41, 70], D = [34, 35, 74], I1 = [70, 71], L9 = [−79~−72], |
| | L2 = [−88~−87, −10~−9], L3 = [−95~−95, 10~12, 37~38, 65~67], L6 = [−64~−59] |
| Struc1897 | M = [−90, −88, −38, 2, 16, 45, 48, 57, 74], W = [−57, −50, −49, −43, −33, −6, −5, 22, 28, 58, 59, 66, 71], D = [−71, 4], I8 = [78, 79], L2 = [−96~−95, −60~−59, −52~−51], |
| | L3 = [−27~−25], L4 = [34~37] |
| Struc1898 | M = [ −40, −37, −12, −6, 19, 34, 37, 43, 49, 73, 94], W = [−48, −43, −16, 39, 65], I1 = [54, 55], L2 = [−50~−49, 28~29], L3 = [−28~−26] |
| Struc1899 | M = [−38, −6, 12, 26, 44, 66, 71, 83, 94], W = [−88, −18, −77, −48, −41, −28, −9, 4, 11, 28, 38, 57, 74, 92], D = [−23, −22], I1 = [−58, −57], I2 = [−28, −27], |
| | I1 = [56, 57], L1 = [87~90], L2 = [−83~−82, −51~−50], L5 = [−91~−91, 32~36] |
| Struc1900 | M = [−96, −22, −5, 4, 17, 31, 34, 36, 65, 72, 90], W = [−86, −83, −59, −52, −47, −40, −13, 3, 11, 28, 35, 58, 59, 69, 94], I1 = [62, 63], L9 = [−75~−75], |
| | L2 = [−85~−84, 84~85, 92~93], L3 = [−51~−49, 41~43] |
| Struc1901 | M = [−18, 15, 25, 47, 57, 60, 98], W = [−24, −3, 13, 31, 32, 53, 68, 70, 84], L2 = [−27~−26, 0~1, 11~12, 37~38, 43~44, 62~63], L4 = [−16~−13] |
| Struc1902 | M = [−65, −63, −60, −51, 1, 30, 36, 56, 86], W = [−69, −57, −54, −36, −34, −20, −19, 12, 13, 17, 29, 34, 41, 59, 63, 77], |
| | D = [−98, −97, −96, −95, −94, −93, −92, −91, −90, −89, −88, −87, −86, −85, −83, −82, −81, −80, −79, −78, −77, −76, −75, −74, −73, −72, −71, −70, −92, 67], |
| | I1 = [−58, −57], I1 = [92, 93], L1 = [−15~−13], L3 = [−28~−27], L6 = [−8~−5, 71~76] |
| Struc1903 | M = [−40, −27, 9, 12, 27, 51, 53, 58, 61, 65, 76], W = [−16, 4, 29, 37, 67, 14, 77, 83], D = [−69, −13, −12, −11], I1 = [−64, −63], I2 = [82, 83], L2 = [−95~−94, 35~36], |
| | L5 = [−51~−47] |
| Struc1904 | M = [−86, −83, −55, −50, −34, −22, −19, −6, −3, 46, 59, 69, 76, 86, 91], W = [−69, −65, −64, −59, −52, −38, −37, −16, −12, 4, 11, 25, 41, 66, D = [−92], I1 = [−91, −90], |
| | I2 = [−69, −68], L2 = [9~10, 16~17], L3 = [35~37] |
| Struc1905 | M = [−60, −27, −25, 4, 8, 26, 36, 41, 46, 75], W = [−63, −61, −48, −47, −28, −22, −10, 2, 9, 11, 35, 60, 66, 67], I1 = [62, 63], L3 = [−87~−83, 71~73] |
| Struc1906 | M = [−93, −63, −60, −57, −47, −25, 4, 11, 16, 28, 50, 71], W = [−61, −28, −5, 10, 20, 31, 58], D = [−70, −51], I1 = [−84, −83], I1 = [−50, −49], L1 = [−4~−3, 37~39], |
| | L2 = [66~67], L3 = [53~55], L5 = [31~33] |
| Struc1907 | M = [−47, −12, −6, −3, 2, 4, 66, 87], W = [−93, −53, −51, −43, −40, −17, 28, 33, 47, 58, 59, 72], D = [−72, −71, −65, −64, −63, −62, −61, −60, −59, −58, −57, −55, −55, −54], |
| | L8 = [−28~−27], L2 = [16~17, 76~82, 90~91], L3 = [34~36] |
| Struc1908 | M = [−95, −85, −71, −62, −54, −28, 1, 9, 21, 67, 70], W = [−70, −65, −63, −56, −55, −5, −4, 4, 12, 18, 19, 27, 33, 37, 41], D = [−47, −46, −45, −44, 29, 63, 78], |
| | I1 = [−18, −17], L2 = [−78~−78], L3 = [34~36, 73~74] |
| Struc1909 | M = [−98, −88, −80, −76, −53, −29, −6, 4, 8, 11, 59, 68], W = [−45, −15, −12, 41, 14], D = [63], I11 = [−24, −23], L2 = [−61~−61, −39~−38, 27~28, 75~76], |
| | L3 = [−93~−91, 35~37] |
| Struc1910 | M = [−96, −82, −59, −29, −8, 4, 11, 25, 29, 46], W = [−98, −92, −60, −51, −48, −38, −1, 22, 27, 32, 4, 58, 59, 6, 67], I4 = [71, 72], |
| | L2 = [−94~−93, −85~−84, −79~−78, −70~−70, −50~−49, 34~35] |
| Struc1911 | M = [−88, −32, −18, −14, 21, 41, 72, 14], W = [−92, −91, −57, −52, −51, −26, −6, −4, 34, 36, 37, 66, 67], D = [−47, −46, −29, −28, −27, 57, I1 = [−92, −91], I2 = [−52, −51], |
| | L1 = [88~91], L2 = [−38~−37, 4~5, 10~11, 58~59, 83~84, 95~96], L4 = [−64~−61, 28~31] |
| Struc1912 | M = [−70, −62, −59, −51, −37, −31, −15, 0, 3, 13, 20, 27, 38, 78, 83], W = [−69, −68, −58, −20, 23, 34, 35, 36, 64, 65, 87], D = [−55], I1 = [−45, −44], |
| | I2 = [57, 58], L2 = [−8~−7, 67~68], L13 = [50~51] |
| Struc1913 | M = [−97, −93, −88, −83, −50, −48, −26, −1, 1, 3, 18, 30, 38, 74], W = [−92, −91, −61, −58, −57, −52, −51, −49, −25, 4, 5, 13, 17, 29, 34, 36, 69, 72, 77], |
| | D = [−24, 10, 35], L1 = [86~88], L2 = [−15~−14, 11~12, 66~67], L4 = [79~80], L5 = [−9~−5], L6 = [−76~−72] |
| Struc1914 | M = [−62, −59, −41, −31, 0, 3, 7, 13, 20, 27, 38, 67, 80], W = [−68, −24, 23, 25, 34, 35, 36, 64, 65, 78, 79, 87, 100], D = [−55], I3 = [−69, −68], I1 = [−45, −44], |
| | I1 = [58, 59], L2 = [−8~−7] |
| Struc1915 | M = [−75, −58, −50, −27, −9, −6, 1, 6], W = [−59, −49, −43, −41, −33, −25, −20, −19, −17, 9, 17, 19, 27, 33, 39, 62], I4 = [−80, −79], I1 = [−61, −60], I1 = [−40, −39], |
| | L1 = [−64~−63, 66~68], L2 = [−48~−47, −15~−14, 34~35, 58~59], |
| | L3 = [−97~−95, −83~−83, 10~12, 28~30], L4 = [71~74], L9 = [−91~−91] |
| Struc1916 | M = [−88, −70, −52, −50, −23, −15, 2, 65], W = [−98, −94, −63, −7, −5, 5, 24, 27, 29, 32, 44, 58, 59], I1 = [−37, −36], L2 = [−65~−64, −30~−29, 11~12], |
| | L3 = [−42~−39, 35~37], L5 = [74~75] |
| Struc1917 | M = [−91, −87, −68, −36, −12, 2, 28], W = [−6, −5, 18], D = [−57, −56, −55, −54, 71, 72, 73, 74, 75, 76, 77, 78], I1 = [−99, −98], L10 = [−77~−75], |
| | L2 = [−50~−47, −28~−27], L4 = [34~37] |
| Struc1918 | M = [−92, −86, −63, −27, 58, 86], W = [−93, −36, −26, −19, 11, 12, 28, 29, 66, 67, 78], D = [−70], L1 = [33~47], L2 = [−50~−49, −6~−5], L3 = [73~75] |
| Struc1919 | M = [−53, −51, −46, −40, −34, −8, 5, 19, 28, 34, 87], W = [−98, −90, −82, −76, −66, −43, −31, −30, −24, −23, −5, 17, 73, 79], I3 = [62, 63], I1 = [66, 67], |
| | L2 = [−60~−60, −15~−14, 58~59, 76~77], L3 = [−69~−57, 81~83], L4 = [68~71] |
| Struc1920 | M = [−84, −60, −31, −6, 6, 24, 74, 85], W = [−99, −53, −3, 7, 35, 59, 61, 67], L1 = [−92~−91, −52~−50], L2 = [−28~−27], L4 = [−77~−77, −45~−44], L5 = [36~40] |
| Struc1921 | M = [−95, −91, −46, −43, −38, −36, −23, −12, −9, 43, 58], W = [−82, −73, −70, −64, −53, −49, −40, −11, 5, 11, 16, 29, 32, 66, 75], L2 = [35~36, 80~81] |
| Struc1922 | M = [−92, −13, 40, 79], W = [−94, −72, −63, −62, −48, −45, −43, −5, 2, 5, 20, 36, 56, 58, 59, 72, 74, 77], D = [−71, 1], I1 = [4, 5], L1 = [88~91], |
| | L2 = [−77~−76, −50~−49, −28~−27, 12~13, 28~29, 34~35] |
| Struc1923 | M = [−37, −35, 2, 10, 12, 28, 35, 41], W = [−93, −86, −80, −38, −28, −14, −6, 20, 69, 75, 81], D = [−95], I1 = [62, 63], L1 = [−72~−56, −61~−48, −16~−15], L2 = [59~70] |
| Struc1924 | M = [−90, −40, −34, −6, −3, 50, 70], W = [−91, −38, −27, −17, 4, 11, 28, 29, 41, 53], D = [−70, −69, −68, 63], I1 = [−53, −52], L1 = [−60~−57], |
| | L2 = [−65~−64, −16~−15, 15~16, 58~59], L3 = [37~39, 74~76], L4 = [−49~−48] |
| Struc1925 | M = [−91, −70, −62, −48, −27, −13, 6, 24, 34, 41, 66, 74], W = [−77, −64, −56, −10, 42, 61], D = [−83], L2 = [36~37], L3 = [−53~−51], L5 = [83~84] |
| Struc1926 | M = [−86, −65, −56, −39, −34, −28, −14, −9, 1, 41, 49, W = [−99, −85, −73, 11, 40, 62], D = [−96], I1 = [−89, −88], I1 = [10, 11], L2 = [−53~−52, −31~−30, 33~34], |
| | L3 = [−76~−74], L4 = [4~8] |
| Struc1927 | M = [−14, 1, 31, 44, 49, 64, 67], W = [−52, 27, 4, 5, 10, 12, 13, 34, 35, 36, 37, 43, 65, 76], D = [58, 59], I1 = [−5, −4], I7 = [73, 74], L2 = [−51~−50, 94~95], |
| | L3 = [−40~−38, −10~−7], L13 = [80~92], L7 = [68~70] |
| Struc1928 | M = [−85, −27, −25, −6, −3, 16, 41, 46, 83], W = [−80, −63, −61, −51, −47, −40, −30, −28, −22, −10, 9, 29], D = [−70, 63, 64, 65, 66, 67, 68, 69], L1 = [3~4], |
| | L2 = [−60~−59, 7~8, 35~36], L3 = [79~81] |
| Struc1929 | M = [−89, −58, −41, −35, −31, −20, 0, 27, 29, 65, 84], W = [−84, −75, −71, −67, −66, −59, −57, −37, −12, −4, −3, 50], D = [58, 59], I4 = [−81, −80], I10 = [−77, −76], |
| | I15 = [−76, −75], L2 = [−65~−64, 62~63], L4 = [−95~−94], L6 = [33~34], L7 = [−85~−85], L9 = |
| | [75~76] |
| Struc1930 | M = [−96, −83, −66, −62, −59, −52, −38, −34, −26, −13, 34, 43, 66, 69, 88], W = [−94, −87, −54, −53, −50, −49, −6, −5, 4, 5, 28, 29, 36], D = [−31, −30], L1 = [−73~−72], |
| | L2 = [61~62], L4 = [72~77] |
| Struc1931 | M = [−61, −27, −25, −12, 9, 51, 53, 58, 61, 63, 65, 76], W = [−63, −59, −43, −6, 4, 11, 37, 74, 77, 83], D = [−69], I1 = [−64, −63], L3 = [34~36], L5 = [−51~−47] |
| Struc1932 | M = [−93, −48, −38, −36, −13, 7, 20, 67], W = [−95, −73, 4, 5, 6, 58, 59, 69], I4 = [77, 78], L1 = [−72~−69], |
| | L2 = [−64~−63, −60~−59, −52~−51, −28~−27, 11~12, 15~16, 62~63], L4 = [34~37] |
| Struc1933 | M = [−93, −51, −28, −10, −6, −3, 4, 11, 16, 27], W = [−97, −70, −68, −67, −63, −25, −5, 65, 72, 73, 90], D = [−74, −35, −34, −33, −32, 16], |
| | L2 = [−59~−58, −55~−54, −16~−15, 87~88], L7 = [30~35] |
| Struc1934 | M = [−75, −67, −16, −8, 3, 14, 39], W = [−97, −53, −3, 8, 9, 37, 49, 54, 55], D = [−2, −1, 0], I3 = [−6, −5], I1 = [59, 60], L9 = [−33~−33], |
| | L2 = [−84~−83, −71~−70, −58~−57, −48~−47, 42~43] |
| Struc1935 | M = [−85, −69, −45, −37, −35, −30, −1, 1, 4, 6, 8, 19, 49, 98], W = [−68, −5, −2, 10, 12, 18, 22, 24, 26, 31, 33, 34, 41, 69, 72], I1 = [−17, −16], I4 = [−9, −8], |
| | I9 = [15, 16], I15 = [30, 31], I12 = [32, 33], I4 = [38, 39], I11 = [40, 41], I1 = [85, 86], I3 = |
| | 89, 90], L11 = [44~45], L1 = [−14~−13, 77~78], L2 = [−89~−88, −56~−55, −41~−40, −7~−6, 64~68, 80~81], L3 = [22~23] |
| Struc1936 | M = [−51, −3, 8, 16, 44, 74], W = [−99, −69, −59, −57, −55, −53, −52, −50, −43, −39, −32, −23, −19, −13, −12, 4, 5, 7, 9, 10, 15, 17, 23, 29, 33, 43, 54, 55], |
| | I4 = [−58, −57], I4 = [−53, −52], I15 = [−48, −47], I15 = [−40, −39], I11 = [−39, −38], I12 = [−20, −19], |
| | I14 = [−11, −10], I3 = [1, 2], I2 = [4, 5], I8 = [17, 18], I14 = [26, 27], I3 = [52, 53], I6 = [64, 65], L1 = [68~70], L2 = [−91~−91, −64~−63, −29~−28, 59~60], |
| | L3 = [61~62], L5 = [35~37, 39~40, 49~50], L7 = [−46~−44, −33~−33], L8 = [−5~−5], |
| | L10 = [−16~−16], L11 = [23~24] |
| Struc1937 | M = [−63, −29, −3, 1, 6, 8, 12, 16, 24, 56, 76, 87, 94], W = [−94, −92, −83, −42, −28, −27, 37, 75, 80], D = [63], L1 = [−52~−50], L2 = [−6~−5, 35~36, 71~72], |
| | L3 = [−47~−47], L4 = [−87~−84] |
| Struc1938 | M = [−82, −73, −31, 28, −9, 1, 3, 21, 41], W = [−83, −72, −53, −21, −20, 12, 30], I2 = [−78, −77], L2 = [−14~−13, 10~11, 33~34] |
| Struc1939 | M = [−91, −83, −59, −54, −51, −14, −6, −3, 5, 8, 13, 16, 44, 55], W = [−45, −28, −12, 11, 41, 56, 59, 61, 64, 68, 79], D = [32, 35], I1 = [25, 26], L1 = [51~52], |
| | L2 = [−70~−70, −41~−40, 27~28, 57~58, 66~67], L10 = [76~77], L4 = [70~73] |
| Struc1940 | M = [−95, −91, −83, −57, −41, −37, −28, −22, −6, −3, 0, 3, 10, 12, 29, 37, 78, 82], W = [−9, −68, −64, −63, −60, −59, −53, −51, −35, 13, 17, 36, 55, 58, 59, 68], |
| | I3 = [34, 35], I4 = [64, 65], L1 = [−72~−70], L2 = [−78~−78, −15~−14, 43~44], L3 = [71~73], L4 = [−50~−47] |
| Struc1941 | M = [−92, −89, −56, −52, −44, −28, −20, −18, −16, 26, 65, 67, 71, 85, 89], W = [−99, −75, −63, −51, −47, −40, −34, −6, 4, 5, 12, 28, 29, 35, 41, 58, 59, 70] |
| Struc1942 | M = [−97, −89, −76, −64, −44, −41, −37, −33, −28, −20, 1, 3, 12, 26, 30], W = [−91, −77, −68, −53, −51, −32, −10, 4, 5, 9, 13, 17, 19, 28, 33, 35, 41, 55, 59, |
| | 69, 74, 76, 78], D = [72], I1 = [−63, −62], L1 = [−60~−54, −50~−48], L2 = [−9~−9], L3 = [−18~−15, 65~68], |
| | L4 = [−83~−83], L9 = [80~88] |
| Struc1943 | M = [−76, −72, −61, −58, −31, −19, −17, 8, 18, 35, 47, 67, 70, 73, 77, 81], W = [−18, −17, −75, −70, −69, −39, 24, 42, 44, 45, 48, 49, 83, 97], D = [1, 2, 3, 4, 5], |
| | I2 = [24, 25], I3 = [41, 42], I1 = [43, 44], I1 = [50, 51], I1 = [53, 54], I6 = [98, 99], L8 = [60~61], L2 = |
| | [−37~−36], L11 = [−11~−6] |
| Struc1944 | M = [−57, −48, −22, −3, 10, 19, 53, 82, 88], W = [−60, −54, −51, −35, −27, −13, −9, −5, 11, 12, 17, 22, 24, 33, 35, 36, 65], I5 = [62, 63], L1 = [−96~−95], |
| | L2 = [−91~−91], L3 = [41~43] |
| Struc1945 | M = [−87, −83, −61, −48, −27, −13, 8, 35, 37, 43, 46, 49, 52, 78], W = [−93, −88, −70, −49, −31, −6, 11, 12, 58, 69, 73, 75], I1 = [−36, −35], L1 = [64~66], |
| | L2 = [−58~−57, −42~−39], L4 = [−53~−50] |
| Struc1946 | M = [−90, −56, −40, −36, −32, −27, −19, −1, 1, 7, 56], W = [−84, −37, −33, −15, −6, 16, 28, 59, 65, 67, 68, 72, 74, 99], D = [−82], I3 = [9, 10], I13 = [12, 13], |
| | I14 = [15, 16], I15 = [19, 20], I15 = [21, 22], I2 = [35, 36], I6 = [37, 38], I7 = [41, 42], I3 = |
| | 43, 44], I12 = [48, 49], I2 = [51, 52], I12 = [64, 65], I10 = [66, 67], L1 = [24~25], L2 = [−96~−95, −70~−69, −25~−24], L4 = [59~62], L7 = [77~81], L9 = [30~32], |
| | L11 = [87~93] |
| Struc1947 | M = [−65, −59, −31, −25, −19, 0, 22, 27, 44, 63, 67, 69, 73, 80, 85], W = [−69, −68, −61, −34, −20, −18, 5, 13, 23, 34, 35, 64, 75, 87, 100], D = [−57], I1 = [−45, −44], |
| | I1 = [32, 33], I2 = [57, 58], L2 = [−16~−15, 36~38], L4 = [−8~−7] |
| Struc1948 | M = [−93, −76, −71, −29, −14, −9, −5, 8, 34, 37], W = [−90, −55, −52, −40, −32, −16, 17, 29, 41], D = [−80, −51, −50, −49, −48], I2 = [−90, −89], I11 = [−24, −23], |
| | I3 = [63, 64], L1 = [−85~−84, 67~74], L2 = [−98~−97, −39~−38, 1~2, 11~12], L4 = [76~77], |
| | L6 = [−64~−61], L12 = [88~97] |
| Struc1949 | M = [−90, −75, −35, −2, 19, 25, 37, 57], W = [−89, −60, −59, −55, −28, −27, 5, 6, 7, 9, 10, 13, 16, 18, 41], D = [−14], I4 = [−79, −78], I4 = [12, 13], I1 = [21, 22], |
| | I5 = [29, 30], I1 = [32, 33], I15 = [33, 34], I15 = [46, 47], I15 = [49, 50], I7 = [50, 51], I1 = |
| | [77, 78], L1 = [−24~−18], L2 = [2~4], L3 = [−87~−85, 39~40], L9 = [−8~−6], L13 = [59~71] |
| Struc1950 | M = [−97, −94, −92, −90, −60, −43, −40, −37, −9, −6, 1, 30], W = [−99, −66, −63, −59, −57, −10, 4, 17, 26, 29, 33, 37], D = [12], I1 = [10, 11], L1 = [34~35], |
| | L2 = [−16~−15], L3 = [−85~−83, −51~−49], L6 = [−76~−58] |
| Struc1951 | M = [−92, −65, −38, −13, −6, 12, 26, 38, 71, 73], W = [−91, −88, −78, −77, −63, −57, −41, −40, −28, −12, −9, 4, 5, 11, 15, 28, 29, 36, 37, 51, 96], I1 = [−58, −57], |
| | I2 = [−28, −27], I1 = [56, 57], I1 = [82, 63], I2 = [88, 89], L1 = [−53~−45, 93~95], |
| | L2 = [−83~−82, 65~66], L6 = [−23~−22] |
| Struc1952 | M = [−60, −47, 4, 7, 30, 43, 67, 74, 79, 84, 89], W = [−64, −63, −27, −4, 17, 35, 58, 59], D = [−70, −51], I1 = [−50, −49], L2 = [−38~−37, 36~37] |
| Struc1953 | M = [−98, −84, −71, −28, 7, 28, 36, 43, 79], W = [−64, −63, −59, −43, −13, −4, 5, 29, 32, 35, 58, 59, 72], I3 = [−58, −57], I5 = [−44, −43], L1 = [−53~−50], |
| | L2 = [−94~−93, −10~−9, 30~31, 73~74], L3 = [−78~−76, 10~12] |
| Struc1954 | M = [11, 20, 49, 66, 74, 81, 84], W = [−10, −6, 43, 46, 48, 64, 73, 93], I2 = [−6, −5], L1 = [3~5], L2 = [97~98], L4 = [59~62] |
| Struc1955 | M = [−50, −3, 4, 7, 52, 55, 62, 67, 94, 98], W = [−58, −57, −43, −17, −15, 50, 58, 90, 93, 96, 97], D = [29, 30, 31, 32, 33, 34, 35, 36, 37], |
| | L2 = [−60~−59, −20~−19, −11~−10, 86~87], L3 = [−40~−38] |
| Struc1956 | M = [−29, −19, −16, 6, 27, 39, 42, 49, 71, 79, 95], W = [−42, −40, −34, −33, −31, −24, −23, −7, 4, 13, 14, 66, 68], D = [21, 22], L1 = [33~34], L2 = [−36~−35, 9~10, 59~60] |
| Struc1957 | M = [−47, −4, 9], W = [−99, −70, −61, −58, −57, −50, −49, −40, −34, −20, −19, 61], I11 = [−92, −91], I1 = [−83, −82], I1 = [−64, −63], I3 = [40, 41], I4 = [60, 61], |
| | I2 = [64, 65], L1 = [−68~−67, −33~−32], L2 = [−88~−87, −52~−51, 53~54, 71~74], L3 = |
| | [28~30], L4 = [−29~−27, 34~36], L6 = [−78~−71], L7 = [−97~−94] |
| Struc1958 | M = [−89, −82, −72, −65, −61, −37, −28, −14, 27, 36, 39, 41, 60, 64], W = [−84, −23, −13, −9, −4, 1, 12, 44, 59], D = [−95], L2 = [−31~−30, −20~−19, 50~51], L5 = [68~73] |
| Struc1959 | M = [−82, −78, −75, −72, −63, −42, −5, 0, 2, 22, 25, 44, 67, 82], W = [−96, −88, −73, −61, −48, −37, −28, −20, 3, 4, 50, 57, 58], D = [−91], I1 = [−93, −92], I1 = [65, 66], |
| | L1 = [60~61], L2 = [−52~−51, −40~−39, −25~−24, 77~78], L3 = [35~40] |
| Struc1960 | M = [41, 56, 73], W = [−62, −61, −59, −54, −38, −15, −14, 11, 12, 46, 72, 79], I3 = [−62, −61], I13 = [−55, −54], I6 = [−29, −28], I1 = [36, 37], L1 = [31~34], |
| | L2 = [−26~−26, 4~5, 63~64], L3 = [−46~−45, −21~−21], L15 = [−52~−52] |
| Struc1961 | M = [−84, −74, −60, −23, −19, −4, 12, 15, 55, 61, 69, 75], W = [−87, −68, −63, −54, −36, −6, 1, 13, 50, 63, 66, 79], I1 = [−71, −70], I1 = [−63, −62], L3 = [64~65], |
| | L2 = [−92~−91, −40~−39], L10 = [28~39] |
| Struc1962 | M = [−90, −60, −40, −23, −19, −6, −4, 12, 15, 30], W = [−63, −52, −51, −36, −25, −22, 13, 17, 26, 33, 49, 53, 57, 58, 63, 75], I1 = [−63, −62], I3 = [44, 45], I15 = [60, 61], |
| | L1 = [−98~−96], L2 = [−75~−74, 4~5, 50~52], L4 = [34~39], L5 = [65~66], L6 = [73~74] |
| Struc1963 | M = [−86, −53, −40, −23, −19, −5, 12, 15, 55, 61], W = [−63, −55, −41, −36, −15, −6, 50, 63, 76, 78, 79], D = [40, 41], I1 = [−63, −62], I3 = [−60, −59], L9 = [64~71], |
| | L2 = [−48~−47, −28~−27], L3 = [28~30], L6 = [−14~−11] |
| Struc1964 | M = [−64, −57, −36, −31, −3, 0, 4, 6, 13, 37, 40, 45], W = [−88, −19, −15, −9, 2, 11], D = [−22], I3 = [−88, −87], L1 = [−82~−81, −78~−76], L4 = [−26~−25, 28~32] |
| Struc1965 | M = [−16, −8, −3, 17, 28, 30, 46, 73, 87], W = [−20, −15, −14, −6, 1, 4, 5, 27, 29, 31, 34, 61, 62, 75], D = [64], L5 = [9~13] |
| Struc1966 | M = [−8, 21, 41, 47, 76], W = [1, 14, 18, 36, 43, 48, 60, 64, 65, 96, 97], D = [10], L3 = [1~3, 5~7, 91~92], L4 = [82~87] |
| Struc1967 | M = [−52, −49, −37, −26, −6, 12, 17, 35, 41, 73, 89], W = [−60, −39, −38, −15, −14, −13, −9, −1, 1, 11, 28, 37, 46, 58, 59, 63, 69, 74, 75, 79], L2 = [−57~−56, −41~−40, |
| | 29~30, 63~64], L5 = [80~84] |
| Struc1968 | M = [−81, −62, −57, −45, −9, −2, 5, 26, 40, 48, 59], W = [−92, −89, −76, −36, −26, −25, 11, 28, 29, 32, 37, 42, 43, 55], I3 = [31, 32], L2 = [−91~−90] |
| Struc1969 | M = [−27, −6, 34, 37, 46, 75], W = [−91, −85, −62, −61, −53, −49, −28, −15, −14, −9, 1, 4, 11, 28, 58, 70, 79], L2 = [−83~−82, −68~−66, −4~−3], L4 = [−57~−57, 51~54], |
| | L5 = [−46~−41], L6 = [66~68] |
| Struc1970 | M = [−89, −82, −72, −70, −62, −57, −37, −31, −28, −4, 33, 41, 46], W = [−78, −23, −13, −3, 4, 9, 42, 44, 59], D = [57, 58], I4 = [−85, −84], |
| | L2 = [−95~−93, −20~−19, 12~11, 38~39, 50~51] |
| Struc1971 | M = [−83, −78, −63, −39, −34, −26, 0, 22], W = [−89, −32, −31, −27, −23, −22, −18, −17, 10, 11], L3 = [−49~−47] |
| Struc1972 | M = [−47, −44, −34, −7, −5, 20, 37, 52, 58, 81, 88], W = [−40, −14, −9, 1, 4, 28, 34, 35, 55, 71], D = [72, 73, 74, 75, 76], L2 = [29−30, 40~41, 66~67, 91~92], |
| | L3 = [−59~−57, −51~−49, 10~12] |
| Struc1973 | M = [−92, −78, −47, −39, −4, −2, 13, 22, 72], W = [−68, −57, −49, −46, −34, −22, −19, −16, −10, −9, 3, 4, 9, 19, 38, 49, 51, 70], D = [−70, 39, 76], I1 = [−58, −57], |
| | I1 = [41, 42], I1 = [43, 44], I2 = [49, 50], L1 = [−56~−64, 93~95], L2 = [−74~−73, 33~34, 87~88], |
| | L3 = [−85~−82, −33~−31, 28~30, 45~46], L4 = [80~83] |
| Struc1974 | M = [−14, −5, 13, 81, 87], W = [−30, −29, −16, −10, 9, 15, 31, 37, 45, 67, 68, 80, 89, 98], D = [7], I1 = [4, 5], I1 = [19, 2], I1 = [22, 23], I1 = [99, 100], L1 = [54~65], |
| | L2 = [−46~−45, 41~42, 46~47, 91~92], L3 = [26~30], L4 = [−42~−39, 75~76] |
| Struc1975 | M = [−67, −14, −10, −2, 0, 36, 48], W = [−94, −78, −72, −19, −18, −13, 5], D = [−35, −32],I1 = [−97, −96], I1 = [−34, −33], I2 = [45, 46], L2 = [−91~−90, 6~7, 24~25], |
| | L3 = [−61~−59, −27~−25], L4 = [−85~−82] |
| Struc1976 | M = [−52, −47, −38, −1, 5, 9, 12, 29, 81], W = [−99, −95, −94, −66, −50, −40, −15, −14, −9, −5, 1, 61], I1 = [34, 35], I1 = [37, 38], I3 = [40, 41], I4 = [57, 58], |
| | I1 = [62, 63], I1 = [64, 65], I3 = [75, 76], L1 = [−78~−76], |
| | L2 = [−70~−67, −63~−63, −28~−27, 53~54], L3 = [17~19] |
| Struc1977 | M = [−1, 10, 17, 20, 22, 43, 50, 59, 80, 83, 88], W = [3, 66, 90], L1 = [68~71], L2 = [34~35], L6 = [73~75] |
| Struc1978 | M = [−95, −56, −43, −41, −29, 17, 29, 35, 55], W = [−94, −70, −33, −26, −10, 3, 11, 65], D = [−19, 63], I8 = [−9, −8], I3 = [32, 33], L1 = [−78~−75], |
| | L2 = [−52~−51, −36~−35, 12~13, 38~39], L3 = [−16~−15], L4 = [4~7], L9 = [67~72] |
| Struc1979 | M = [−63, −60, −53, −49, −10, −5, −1, 19, 25], W = [−83, −82, −74, −51, −28, −20, 5, 14, 28, 42, 48], I1 = [−92, −91], I1 = [−88, −87], I1 = [−30, −29], I5 = [−28, −27], |
| | I1 = [−23, −22], I6 = [36, 37], L9 = [28~30], L2 = [−73~−72, −69~−68, 6~7], L5 = [43~47] |
| Struc1980 | M = [−92, −89, −72, −31, −10, −8, 0], W = [−74, −63, −59, −53, −40, −35, −2, 4], L2 = [−97~−96, −56~−54, −34~−33, 11~12] |
| Struc1981 | M = [−2, 0, 18, 89, 99], W = [−23, 5, 6, 10, 11, 23, 28], D = [−25, −24, 36], I1 = [37, 38], L2 = [13~14] |
| Struc1982 | M = [−26, −6, 12, 17, 27, 35, 41, 66, 73], W = [−60, −59, −54, −51, −48, −41, −40, −38, −28, −15, −14, −9, −5, 1, 11, 28, 37, 46, 58, 59, 67, 79], I2 = [62, 63], |
| | I2 = [79, 80], L2 = [−64~−63, −50~−49, 4~5, 29~30] |
| Struc1983 | M = [−81, −71, −16, −6, 3, 7], W = [−94, −84, −79, −73, −61, −60, −52, −51, −12, −8, 2, 8], L1 = [−32~−24], L2 = [−87~−86, −78~−77, −64~−63, 14~15] |
| Struc1984 | M = [−95, −91, −29, −25, 2, 5, 7, 17, 23, 35], W = [−69, −33, −12, −11, −9, −7, 1, 3, 11], D = [64], I1 = [−71, −70], I2 = [−12, −11], I3 = [32, 33], I7 = [61, 62], |
| | L1 = [−78~−76], L2 = [−67~−67, −36~−35, 12~13, 38~39, 54~55, 67~68], L3 = [−43~−41], L4 = |
| | [−15~−15], L6 = [−20~−18] |
| Struc1985 | M = [−5, 8, 43, 63, 67, 75, 88], W = [−9, 36, 70, 80, 83], D = [−2, 32, 33, 34], I1 = [0, 1], L1 = [92~93], L3 = [47~49], L5 = [96~98] |
| Struc1986 | M = [−1, 2, 11, 18, 40, 67, 72], W = [15, 16, 26, 30, 36, 39, 49, 52, 56, 75, 82], D = [8, 87], I1 = [6, 7], I15 = [46, 47], I1 = [48, 49], I1 = [79, 80], L1 = [−8~−6] |
| Struc1987 | M = [−13, 4, 42, 60, 62, 81, 84, 87], W = [−26, −21, −19, −16 −15, −11, 3, 18, 18, 20, 37, 49, 51, 57, 58, 6, 92, 93], L1 = [45~47], L2 = [−24~−23, −7~−5, 11~12, 35~36] |
| Struc1988 | M = [−97, −52, −31, −10, 12, 23, 66, 70, 81], W = [−59, −48, −47, −9, −5, 1, 4, 11, 30, 52, 59, 60], D = [−13], I1 = [31, 32], L1 = [−83~−69], |
| | L2 = [−28~−27, −19~−19, −16~−15], L3 = [−91~−89, −58~−56, −50~−49, 43~45], L4 = [35~38], L5 = [28~29] |
| Struc1989 | M = [−94, −89, −81, −78, −53, −47, −2, 4, 6, 33, 52, 56], W = [−86, −73, −21, −17, 36], I1 = [−55, −54], I1 = [−43, −42], I1 = [−9, −8], I4 = [29, 30], L1 = [−23~−22], |
| | L2 = [−33~−31], L3 = [−70~−68, −61~−58] |
| Struc1990 | M = [−78, −73, −71, −53, −49, −37, −5, 4, 25, 31], W = [−99, −87, −86, −74, −72, −65, −30, −28, −21, −19, −18, 14, 28, 29, 48], D = [44, 45, 46, 47], I1 = [−87, −86], |
| | L2 = [−69~−68, 6~7, 11~12, 35~36], L3 = [37~38], L4 = [−32~−32], L5 = [−29~−29] |
| Struc1991 | M = [−95, −53, −45, −42, −39, −26, −21, 0, 13, 15, 17, 26, 31, 47, 77, 79], W = [−96, −66, −49, −10, 3, 16, 24, 54, 72, 93, 96], D = [59], L2 = [−32~−31], |
| | L3 = [34~35], L4 = [86~89] |
| Struc1992 | M = [−92, −45, −42, −39, −32, 0, 11, 13, 17, 35, 40, 47, 83, 97], W = [−96, −90, −78, −77, −73, −71, −66, −65, −51, −10, 16, 21, 24, 26, 27, 48, 54, 55, 93, 96], |
| | L1 = [56~57], L2 = [−26~−25] |
| Struc1993 | M = [−97, −83, −73, −68, −63, −53, −19, −5, −2, 4, 36], W = [−51, −28, −24, 14], D = [−49, 25, 44, 45, 46, 47], I1 = [−88, −87], I1 = [−48, −47], L8 = [−29~−29], |
| | L2 = [−78~−78] |
| Struc1994 | M = [−97, −52, −31, −27, −19, −13, −6, −3, 23, 33, 36, 61, 66, 70, 86], W = [−48, −15, −14, −9, 1, 4, 11, 15, 38, 68, 87], I1 = [18, 19], I1 = [42, 43], L1 = [−83~−69], |
| | L2 = [12~14], L3 = [−91~−89, −58~−56, −50~−49, 28~30, 79~81], L6 = [44~45] |
| Struc1995 | M = [−94, −90, −50, −40, −23, −19, −6, 5, 25, 61], W = [−63, −41, −36, −15, −14, −9, 1, 11, 50, 63, 79], D = [40, 41], I2 = [−70, −69], I1 = [−63, −62], |
| | L2 = [−83~−82, −48~−47, −28~−27, −4~−3, 15~16, 71~72], L5 = [64~67] |
| Struc1996 | M = [−81, −49, −40, −30, −21, −10, 0, 3, 17, 21, 23, 32, 65, 75, 87], W = [−88, −80, −39, −32, −25, 16, 27, 41, 56, 67, 70, 95, 97], D = [−64], I1 = [−68, −67], |
| | I15 = [37, 38], L1 = [58~59], L2 = [−78~−77, −24~−23, 12~13, 80~81] |
| Struc1997 | M = [−97, −79, −59, −54, −32, −27, 14, 85], W = [−84, −83, −56, −49, −42, −28, −14, 4, 5, 6, 11, 12], D = [−63, 30, 31, 32, 33, 34, 35, 36, 41, 44, 45, 46, 47], |
| | I1 = [−67, −66], L2 = [−48~−47, 64~67], L3 = [−93~−91], L4 = [57~59] |
| Struc1998 | M = [−96, −90, −67, −38, −20, −16, −10, −2, 6, 12, 17, 68, 75, 83, 95], W = [−68, −66, −63, −57, −56, −54, −47, −28, −27, −15, −14, −9, 1, 10, 15, 28, 44, 76, 77, 76, 91, 99], |
| | I14 = [−64, −63], I15 = [−57, −56], I15 = [−55, −54], I10 = [−48, −47], L1 = [51~53], L2 = |
| | [−81~−80, 46~48], L4 = [−51~−51], L5 = [30~34], L9 = [−62~−62], L15 = [−58~−58] |
| Struc1999 | M = [−89, −85, −68, −58, −49, −6, 4, 9, 12, 14, 17, 25, 30, 42], W = [−96, −67, −65, −54, −53, −39, −33, −9, −7, −5, 1, 3, 11, 36, 44, 74, 75, 77], D = [−15, −14], |
| | L2 = [34~35, 67~68], L3 = [−79~−77] |
| Struc2000 | M = [−82, −57, −31, −13, 43, 51, 67, 72], W = [−96, −90, −62, −61, −47, −28, −25, −14, −12, −11, −1, 1, 4, 28, 29, 34, 35, 84], D = [−51], I1 = [−54, −53], |
| | L2 = [−92~−91, −74~−72, −46~−45, −27~−26, 36~37], L4 = [88~91], L5 = [−4~−2] |
| Struc2001 | M = [16, 38, 43], W = [−24, −23, −22, −20, −19, −16, −15, 1, 3, 4, 7, 13, 20, 21, 32, 53, 54, 58, 62, 63, 88], D = [47, 18], I2 = [−22, −21], I14 = [25, 26], I7 = [28, 29], |
| | I10 = [32, 33], I1 = [39, 40], L2 = [5~6], L3 = [80~82], L4 = [−2~0], L5 = [−14~−9] |
| Struc2002 | M = [−92, −67, −34, −3, 7, 36], W = [−51, −50, −16, 1, 3, 9, 33, 34, 42, 57, 60, 61, 65, 66, 73, 74, 83], D = [−71, −8, 56], I13 = [−99, −98], I10 = [−96, −95], I2 = [3, 4], |
| | L1 = [10~11], L2 = [−85~−85, −61~−60, −53~−52, 28~29] |
| Struc2003 | M = [−57, −38, −22, −20, −15, −8, 35, 79, 82], W = [−60, −59, −52, −34, −11, −10, 1, 9, 41, 52, 60, 70, 71], D = [84, 85], L2 = [−63~−63, −3~−2, 12~13, 25~26, 88~89], |
| | L3 = [64~66], L4 = [92~94] |
| Struc2004 | M = [8, 38, 43, 49, 55, 67, 75, 88], W = [−9, −8, 1, 12, 61, 65, 70, 71], D = [32, 33, 34], I13 = [−9, −8], I5 = [0, 1], L1 = [−5~−3] |
| Struc2005 | M = [73], W = [−25, −23, −19, −17, −11, −10, −7, 8, 12, 18, 19, 25, 33, 41, 53, 75, 87, 92, 93], I1 = [−9, −8], I2 = [11, 12], I15 = [17, 18], I10 = [18, 19], |
| | I3 = [24, 25], I1 = [37, 38], I15 = [43, 44], I7 = [45, 46], I7 = [50, 51], I2 = [55, 56], L2 = [59~62], L3 = |
| | [65~67], L4 = [−16~−13], L7 = [−6~−3], L9 = [33~34], L11 = [0~2], L14 = [30~31] |
| Struc2006 | M = [−92, −60, −34, 15, 26, 33, 36, 58], W = [−89, −65, −64, −49, −29, −16, 1, 3, 35, 57, 60, 65, 66, 68, 73], I13 = [−87, −86], I4 = [−81, −80], I1 = [3, 4], |
| | L2 = [−52~−51, 28~29, 61~62], L3 = [9~11], L5 = [−8~−3] |
| Struc2007 | M = [−6, 6, 20, 35, 42, 62, 67, 81, 91, 97], W = [−19, −17, −15, −11, 3, 5, 49, 50, 66, 77, 93], I12 = [−3, −2], L2 = [11~12], L3 = [−16~−16, −10~−10], L7 = [−24~−22] |
| Struc2008 | M = [6, 10, 22, 32, 43, 47, 75, 80, 91], W = [−18, 14, 18, 19, 42, 49, 60, 76, 82, 89, 94], D = [68], I14 = [−11, −10], I1 = [12, 13], I7 = [38, 39], L1 = [96~97], |
| | L2 = [−2~−1, 64~65], L4 = [−17~−14] |
| Struc2009 | M = [−97, −93, −66, −50, −14, −12, −6, 59, 67, 72], W = [−84, −83, −44, −43, −28, −25, −15, −13, −9, −5, 4, 5, 13, 17, 29, 36, 44, 57, 69, 74, 75], |
| | D = [−79, −78, −77, −76, −75, −2, 14], I10 = [−69, −68], L2 = [−48~−47, −32~−31, 7~10] |
| Struc2010 | M = [−92, −60, −34, −23, −3, 1, 7, 29, 40, 58], W = [−65, −57, −50, −49, −41, −29, −18, −16, −14, −2, 3, 9, 33, 35, 57, 60, 61, 65, 73], D = [−8], I2 = [3, 4], I2 = [32, 33], |
| | I2 = [36, 37], I4 = [49, 50], I3 = [81, 82], L1 = [−76~−75, 10~11], |
| | L2 = [−85~−85, −52~−51, −28~−27] |
| Struc2011 | M = [−29, −26, 9, 32, 37, 76, 85, 93], W = [−62, −57, −47, −25, −14, −13, −10, −1, 1, 13, 27, 45, 47, 72, 73, 83], D = [48, 66, 88], I1 = [−9, −8], I1 = [40, 41], |
| | I1 = [83, 84], L2 = [−59~−58, −3~−2, 43~44] |
| Struc2012 | M = [73], W = [−25, −23, −19, −17, −11, −10, −7, 8, 12, 18, 19, 25, 33, 41, 53, 75, 87, 92, 93], I1 = [−9, −8], I2 = [11, 12], I15 = [17, 18], I10 = [18, 19], |
| | I3 = [24, 25], I1 = [37, 38], I15 = [43, 44], I7 = [45, 46], I7 = [50, 51], I2 = [55, 56], L2 = [59~62], |
| | L3 = [65~67], L4 = [−16~−13], L7 = [−6~−3], L9 = [33~34], L11 = [0~2], L14 = [30~31] |
| Struc2013 | M = [1, 11, 32, 37, 54, 67], W = [−13, −10, −8, 28, 29, 39, 40, 45, 49, 52, 53, 55, 63, 64, 73, 75, 99], I13 = [49, 50], L2 = [86~87], L3 = [81~83], L5 = [45~47], |
| | L6 = [−5~−4] |
| Struc2014 | M = [−95, −83, −62, −33, −6, 20, 38, 41, 45, 56, 73, 79], W = [−82, −55, 1, 3, 8, 57, 59], D = [26, 27, 28, 29, 30, 31, 32, 33], L8 = [50~53], |
| | L2 = [−72~−71, −60~−59, −31~−30], L5 = [82~83] |
| Struc2015 | M = [−29, −26, 9, 32, 37, 76, 85, 93], W = [−47, −25, −14, −13, −10, −1, 1, 13, 27, 45, 47, 12, 13, 83], D = [48, 66, 88], I1 = [−9, −8], I1 = [40, 41], I1 = [83, 84], |
| | L2 = [−3~−2, 43~44] |
| Struc2016 | M = [−73, −61, −56, −53, −49, −5, −2, 4, 11, 25, 30], W = [−91, −87, −83, −82, −51, −50, −40, −28, −26, −19, −15, 14, 28, 36, 37, 39], D = [46, 47, 48, 49], |
| | I13 = [−93, −92], I9 = [−91, −90], I1 = [−87, −86], I1 = [32, 33], L8 = [−29~−29], |
| | L1 = [−70~−68], L4 = [−78~−77] |
| Struc2017 | M = [7, 19, 29, 73, 79, 83], W = [−20, 43, 4, 50, 7, 87, 93], D = [26, 34, 35], I1 = [−2, −1], I2 = [37, 38], L2 = [48~49, 91~92], L10 = [59~68], L7 = [−9~−9] |
| Struc2018 | M = [−95, −74, −57], W = [−99, −89, −66, −61, −47, −42, −41, −20, −15, −7, 6, 9, 18, 29, 38, 51], I15 = [−27, −26], I11 = [−17, −16], I9 = [−10, −9], I9 = [−5, −4], |
| | I1 = [−1, 0], I3 = [9, 10], I2 = [20, 21], L1 = [12~13], |
| | L2 = [−91~−90, −82~−81, −72~−72, −68~67, −49~−48, −39~−38, 44~45, 48~49], L3 = [4~5, 25~26, 33~37], L6 = [56~57], L14 = [−25~−24] |
| Struc2019 | M = [−8, 6, 19, 29, 48, 58, 61, 63, 66, 77, 83, 88, 91], W = [−21, −19, −17, 5, 11, 35, 36, 50, 75, 78, 87], I2 = [−14, −13], L4 = [39~42, 71~74] |
| Struc2020 | M = [10, 13, 45, 65, 78], W = [−38, −35, −32, 2, 21, 50, 68, 97], D = [−22, −21, −20], L2 = [−37~−36, −26~−26], L4 = [−31~−30], L6 = [32~38] |
| Struc2021 | M = [−7, 15, 48, 59, 65, 75, 84, 96], W = [−27, −16, −9, 3, 4, 11, 12, 44, 50, 54, 69], I11 = [−16, −15], L1 = [34~38], L4 = [42~43], L6 = [−21~−19] |
| Struc2022 | M = [−89, −70, −31, −9, 3, 19, 39, 50, 62], W = [−94, −93, −82, −78, −76, −21, −20, −18, −14, −13, 42, 43], D = [−57, −56, −55, −54, −53, −29, −28, 9, 10], I2 = [−25, −24], |
| | L1 = [36~37] |
| Struc2023 | M = [−70, −40, −25, −20, 16, 36, 47, 58], W = [−86, −82, −81, −78, −76, −41, −32, −21, −14, −13, 3, 11, 12, 45, 51], D = [−58, −57, −56, −55, −54], |
| | L2 = [−90~−89, −80~−79, 9~10] |
| Struc2024 | M = [−95, −86, −82, −14, −72, −68, −45, −35, −26, −19, 0, 10, 61, 76, 91], W = [−78, −71, −54, −30, −24, 11, 38, 45, 48, 60, 63, 64, 69, 72, 84, 97], |
| | D = [−63, 41, 42, 43, 44], I4 = [35, 36], L2 = [−59~−59, −49~−48, −32~−31, 25~26, 50~53] |
| Struc2025 | M = [−86, −20, −2, 29, 34], W = [−78, −77, −70, −67, −66, −57, −42, −36, −26, −19, −18, −15, 4, 9, 24, 25, 27], I13 = [20, 21], L2 = [−82~−81], |
| | L3 = [−96~−93, −90~−89, 44~46], L7 = [48~52] |
| Struc2026 | M = [29, 75], W = [−20, −18, −17, 4, 7, 8, 20, 21, 30, 35, 51, 52, 53, 58, 71], D = [44], I2 = [1, 2], I9 = [4, 5], I4 = [54, 55], I2 = [58, 59], L2 = [−24~−23, −7~−6], |
| | L4 = [37~40, 60~61, 65~70] |
| Struc2027 | M = [−74, −72, −67, −24, −22, 0, 18, 25, 56, 88], W = [−95, −62, −50, −20, 49, 58, 59, 68, 92, 98], D = [−97, −96, 44, 76], I3 = [−31, −30], I1 = [50, 51], I1 = [73, 74], |
| | L2 = [−59~−58], L3 = [−84~−82, −10~−8], L4 = [34~37] |
| Struc2028 | M = [−16, −8, 0, 17, 49, 52, 58, 63, 69, 76], W = [−79, −46, −20, −19, −11, −9, 21, 45, 48, 61, 62, 78, 93, 95, 96, 100], D = [−35, −34], L1 = [12~13], |
| | L2 = [−62~−61, −55~−54, 35~36] |
| Struc2029 | M = [−26, −16, 8, 10, 18, 35, 44, 47, 62, 70, 87], W = [−48, −36, −27, −13, −9, 5, 11, 13, 30, 51, 52, 72, 86, 91], D = [0, 1], I2 = [5, 6], L2 = [37~39, 93~94], |
| | L3 = [−21~−19] |
| Struc2030 | M = [8, 16, 22, 45], W = [−2, 1, 10, 11, 12, 14, 23, 24, 26, 33, 37, 73, 85, 92, 98], I3 = [−22, −21], I1 = [−13, −12], I15 = [−9, −8], I11 = [−4, −3], I8 = [0, 1], |
| | I3 = [25, 26], I12 = [53, 54], I10 = [56, 57], I12 = [68, 69], I1 = [80, 81], I10 = [96, 97], |
| | I14 = [99, 100], L2 = [38~41, 78~79], L3 = [60~62], L4 = [−17~−17, 30~32], L6 = [47~49, 88~90], L11 = [70~72] |
| Struc2031 | M = [−8, 65], W = [−26, −23, −17, −16, −7, −3, 11, 18, 24, 27, 28, 39, 43, 53, 84], D = [8, 69, 70, 71, 72], I5 = [−18, −17], I15 = [11, 12], I11 = [20, 21], |
| | I2 = [27, 28], I1 = [31, 32], I10 = [49, 50], I1 = [57, 58], I3 = [61, 62], I1 = [82, 83], I1 = [91, 92], |
| | L1 = [−22~−21], L2 = [97~98], L3 = [14~16, 53~55, 76~79], L4 = [−13~−13, −1~0, 44~46], L5 = [86~89], L6 = [22~23, 36~38] |
| Struc2032 | M = [−77, −54, −46, −16, −10, 0, 17, 36, 63, 76], W = [−98, −91, −79, −20, −8, 53, 61, 62, 65, 75, 93, 99], D = [−35, −34, 13, 98], L2 = [−62~−61], L3 = [−87~−85] |
| Struc2033 | M = [−16, −10, 35, 55, 60, 70, 92, 98], W = [−4, 7, 14, 15, 19, 20, 34, 36, 44, 54, 59], L1 = [77~80], L2 = [12~13, 85~86], L4 = [73~74] |
| Struc2034 | M = [−92, −68, −64, −51, −42, −22, −16, 18, 31, 56, 70, 14, 93, 97], W = [−97, −91, −82, −81, −47, −24, −23, −20, −19, −12, −11, 12, 13, 44, 57, 64, 68, 69, 75, 92], |
| | D = [52, 80], I1 = [50, 51], L2 = [−9~−8, 25~26, 40~41, 45~46], |
| | L3 = [−58~−56, −35~−34, 75~77], L4 = [−1~2] |
| Struc2035 | M = [−33, −8, 5, 26, 60, 65, 80, 93], W = [−30, −24, −12, −11, −4, 27, 37, 55, 66, 72, 79, 81, 82, 91, 92, 95, 96, 97], I1 = [32, 33], L2 = [−26~−25, 29~30], L3 = [−3~−1] |
| Struc2036 | M = [−24, −17, 14, 32, 44, 62], W = [−45, −44, −21, −20, −2, 1, 24, 27, 56], D = [23], I5 = [−2, −1], L2 = [35~36, 72~73], L3 = [−35~−34, 4~6, 17~19, 65~67], L4 = [27~28] |
| Struc2037 | M = [−49, −33, −17, −15, 0, 4, 7, 23, 36, 61, 81], W = [−81, −72, −59, −27, −26, −19, −7, −5, 24, 54, 83], D = [−71, −70, −69, −68, −67, −66, −65, −64, −63, −62, −61, −60], |
| | I4 = [−83, −82], I2 = [54, 55], L3 = [69~71], L4 = [44~47], L7 = [75~76] |
| Struc2038 | M = [−24, 3, 10, 45, 84], W = [−50, −49, −41, −34, −18, −6, −5, 23, 26, 39, 40, 42, 48, 76, 82, 90, 98], D = [−40, −39, −38, 34, 35, 54, 55, 56, 57, 58, 59, 60, 61, 62, 63, |
| | 64, 65, 66], I3 = [−46, −45], I1 = [16, 17], I4 = [21, 22], I1 = [28, 29], |
| | I1 = [41, 42], I2 = [92, 93], L2 = [−1~0, 50~51, 80~81, 88~89] |
| Struc2039 | M = [−85, −69, −62, −31, −10, −1, 1, 4, 13, 26, 31], W = [−93, −73, −57, −33, −22, −18, −9, 7], D = [40], L4 = [−97~−94] |
| Struc2040 | M = [−13, 6, 8, 18, 42, 51, 55, 73, 77], W = [5, 19, 61, 68, 76, 81, 85, 86, 98], D = [37, 38], I4 = [−9, −8], I2 = [0, 1], I1 = [81, 82], L2 = [59~60], L5 = [30~33] |
| Struc2041 | M = [−47, −45, −40, −36, −33, −12, −5, 13, 47], W = [−27, −6, 4, 56, 75, 88, 91, 92], D = [22], L2 = [−55~−54, −1~0, 24~25, 64~65, 86~87], L3 = [78~80] |
| Struc2042 | M = [−94, −78, −75, −70, −67, −52, −36, −32, 4, 17, 34, 52], W = [−91, −88, −81, −73, −72, −66, −47, −30, −29, −28, −17, −8, 1, 2, 5, 13, 15, 30, 46, 47], D = [−59, −49], |
| | I1 = [−62, −61], I5 = [−44, −43], I1 = [−42, −41], I2 = [−21, −20], I1 = [40, 41], I1 = [41, 42], |
| | L1 = [−55~−54, −7~−5], L2 = [43~44, 55~56], L4 = [−16~−15, 9~12] |
| Struc2043 | M = [−55, −29, −23, 17, 26], W = [−56, −44, −41, −15, −14, −9, 10], D = [−94, −93, −92, −91, −90, −89, −88, −87, −86, −85, −84, −83, −82, −73, −72, −71, −40, −36], |
| | I5 = [−33, −32], L2 = [−5~−4, −1~0] |
| Struc2044 | M = [−45, −43, −38, −30, 3, 27, 32], W = [−94, −90, −85, −62, −61, −50, −5, 23, 44], D = [−79, −67, −66, 9, 10, 11], I1 = [−19, −18], I10 = [43, 44], |
| | L2 = [−54~−53, −17~−17, −1~0, 36~37] |
| Struc2045 | M = [−90, −81, −56, −49, −40, −36, −19, 10, 25, 41, 70, 72], W = [−98, −84, −75, −72, −37, −27, −21, −20, 1, 2, 28, 29, 54, 75, 84, 87], D = [−94, −3, 62], I1 = [−1, 0], |
| | L2 = [−53~−52, −10~−9, 20~21, 34~35, 56~57, 79~80], L3 = [−29~−28], L6 = [−65~−60] |
| Struc2046 | M = [14, 18, 20, 37, 62, 71, 73, 89], W = [2, 5, 6, 10, 66, 76, 78], D = [3], L8 = [29~32], L3 = [81~84], L5 = [52~60] |
| Struc2047 | M = [−19, 11], W = [−32, −30, −24, −22, −21, −20, −17, −16, −11, −9, −7, −5, 6, 10, 14, 21, 25, 35, 51, 75, 88], D = [29, 76, 77, 78, 79], I8 = [−22, −21], I1 = [−13, −12], |
| | I10 = [−3, −2], I1 = [2, 3], I12 = [18, 19], I10 = [20, 21], I3 = [24, 25], I2 = [32, 33], |
| | I14 = [37, 38], I5 = [39, 40], I12 = [46, 47], I4 = [47, 48], I11 = [52, 53], I5 = [58, 59], I3 = [62, 63], I1 = [81, 82], I9 = [88, 89], I5 = [99, 100], L2 = [−27~−26], |
| | L3 = [4~5, 15~16], L7 = [66~70, 93~94] |
| Struc2048 | M = [−98, −66, −24, 0, 32], W = [−79, −74, −73, −70, −62, −61, −52, −40, −39, −21, 16, 44], D = [25, 45, 46], I2 = [−79, −78], I2 = [−62, −61], I1 = [7, 8], I1 = [22, 23], |
| | L2 = [−28~−27], L3 = [−94~−91, −85~−83, −9~−7] |
| Struc2049 | M = [0, 10, 16, 54, 57, 63], W = [2, 33, 46, 47, 78], I13 = [37, 38], I3 = [39, 40], L3 = [65~71], L4 = [89~92], L7 = [−15~−9] |
| Struc2050 | M = [−77, −71, −66, −61, −49, −40, −13, −7, 13, 23, 29, 31, 56, 58, 63, 86, 98], W = [−97, −96, −91, −57, 20, 44, 59, 84, 87], I2 = [−86, −85], I1 = [−19, −18], |
| | I3 = [33, 34], L1 = [4~6], L2 = [−1~1], L3 = [−55~−53], L4 = [−10~−9] |
| Struc2051 | M = [−66, −62, −9, 16, 19, 37, 46, 99], W = [−63, −61, −55, −54, −51, −48, −39, −32, −25, −14, −3, 2, 5, 8, 10, 36, 71, 81, 87, 89, 98], D = [−37, 68], I1 = [−33, −32], |
| | I13 = [−4, −3], I11 = [2, 3], I11 = [5, 6], I12 = [7, 8], L2 = [−53~−52, 52~53, 61~62, 75~79], |
| | L3 = [−21~−19, 29~31, 64~66], L5 = [87~88] |
| Struc2052 | M = [20, 66, 90], W = [5, 6, 15, 16, 27, 43, 55, 57, 60, 75, 76, 80], D = [40], L2 = [3~4], L3 = [43~45] |
| Struc2053 | M = [26, 54, 65, 73], W = [−3, 6, 7, 12, 43, 44, 64, 98, 99], D = [20, 21, 59, 60, 90], I11 = [3, 4], I5 = [8, 9], I1 = [51, 52], I2 = [56, 57], L9 = [0~0], |
| | L2 = [13~15, 86~87], L1 = [48~49] |
| Struc2054 | M = [−82, −62, −41, −19, −14, −1, 6, 11, 23, 29, 77], W = [−98, −68, −64, −52, −45, −32, 31, 32, 70], D = [38, 39, 40, 41, 42, 43, 44, 45], L1 = [−89~−88, −76~−75], |
| | L2 = [−57~−56], L3 = [89~91], L4 = [−11~−8] |
| Struc2055 | M = [49, 53, 83, 89], W = [6, 13, 41, 43, 62, 69, 95], D = [60, 61], L2 = [16~17, 65~66, 98~99], L4 = [35~38, 73~76], L6 = [0~0] |
| Struc2056 | M = [20, 47, 53, 66, 83, 87, 90], W = [27, 43, 55, 57, 70, 75, 80], D = [5, 6, 41, 60, 61, 71, 72, 73], L3 = [43~45], L5 = [−1~1] |
| Struc2057 | M = [−97, −93, −81, −74, −58, −35, 13], W = [−86, −82, −77, −44, −43, −42, −34, −33, −31, −29], D = [−65], I1 = [−64, −63], L2 = [−51~−50, −39~−38, −7~−6], |
| | L5 = [−89~−89], L6 = [8~10] |
| Struc2058 | M = [−62, −22, 20, 31, 39, 61, 78, 86, 99], W = [−34, −16, 2, 13, 34, 53, 63, 85], D = [−46, −45, −44, −43], I2 = [−58, −57], I1 = [10, 11], L1 = [7~8], L2 = [0~1], |
| | L3 = [42~44], L5 = [−38~−35] |
| Struc2059 | M = [−98, −95, −87, −60, −35, 6, 73, 92, 94], W = [−97, −89, −88, −79, −72, −65, −38, −28, −12, −11, 1, 2, 10, 16, 20, 33, 37, 38, 42, 43, 79, 95], |
| | D = [−78, −77, −76, −75, −8], I2 = [−31, −30], I1 = [22, 23], L2 = [−71~−70], L3 = [−67~−67, 28~30, 46~48], |
| | L5 = [−26~26], L6 = [−43~−39], L15 = [−58~−46] |
| Struc2060 | M = [−90, −69, −60, −43, −38, −32, −18, −13, −3, 37, 45], W = [−89, −77, 7, 36, 58], D = [−94], I1 = [−93, −92], I1 = [6, 7], L2 = [−57~−56, −35~−34, 29~30], |
| | L3 = [−80~−78], L4 = [0~4] |
| Struc2061 | M = [−16, −4, 3, 54, 63, 66, 92], W = [−64, −62, −61, −59, −58, −57, −56, −54, −39, −22, −19, −8, 11, 16, 19, 20, 36, 38, 44, 60, 61, 90], D = [85, 86, 97, 98], |
| | I15 = [−56, −55], I1 = [26, 27], L1 = [28~29], L2 = [−35~−34, −11~−10, −1~0, 21~22, 45~48], L3 = |
| | [39~40, 79~80], L4 = [−53~−53, 71~74] |
| Struc2062 | M = [−78, −62, −41, −29, −18, −9, 19, 21, 65, 90, 95], W = [−45, −4, 11, 27, 39, 47, 86, 97, 100], I3 = [−82, −81], I1 = [−6, −5], I1 = [73, 74], L1 = [−91~−88], |
| | L2 = [45~46, 77~79], L3 = [6~8], L4 = [−2~2, 34~38, 54~57] |
| Struc2063 | M = [−74, −68, −65, −63, −40, −30, −28, −18, −5, 2, 11, 24, 30, 32], W = [−95, −94, −91, −75, −44, −34, −33, −20, 1, 22, 26, 58, 73], D = [−84, −83, −82, −81, 38, 39], |
| | I3 = [−90, −89], I1 = [62, 63], I1 = [69, 70], L1 = [45~48], L2 = [−23~−22, 5~6], L4 = [52~53] |
| Struc2064 | M = [−93, −59, −54, −51, −45, −39, −26], W = [−82, −37, −31, −29], D = [−65], I2 = [−99, −98], I3 = [−89, −88], I1 = [−64, −63], L3 = [10~13] |
| Struc2065 | M = [−96, −75, −27, −20, −14, −7, −1, 6, 12, 52, 62, 66], W = [−95, −73, −71, −40, −38, −17, −8, −4, −3, 2, 30, 32, 36, 46, 47, 86, 89, 91, 92], |
| | D = [−58, −57, −56, −55, 28], I7 = [−45, −44], L1 = [39~42], L2 = [79~80], L3 = [82~84], L4 = [19~22], L5 = [32~35], |
| | L7 = [−91~−85] |
| Struc2066 | M = [−98, −92, −75, −69, −58, −44, −1, 6, 19, 78, 81], W = [−94, −89, −88, −73, −70, −66, −63, −33, −11, −6, 2, 15, 28, 36, 50, 61, 71, 77, 79, 90, 94], D = [69, 70], |
| | I2 = [−61, −60], I15 = [15, 16], I9 = [21, 22], I15 = [24, 25], I15 = [26, 27], I15 = [27, 28], |
| | I15 = [31, 32], I2 = [40, 41], I3 = [42, 43], I11 = [45, 46], I2 = [58, 59], I15 = [62, 63], I2 = [74, 75], I6 = [84, 85], I1 = [87, 88], L1 = [−53~−49, −20~−19], |
| | L2 = [−4~−3], L6 = [32~33], L7 = [54~55, 91~93], L12 = [−31~−27], L14 = [37~38] |

*Notes:
The structural features of the double-stranded secondary structures shown in Table 1 include mismatches (denoted by M) formed between bases, wobble base pairs (denoted by W), internal loops (denoted by Li), deletions (denoted by D), bulges (denoted by Ii), and Watson-Crick pairs (denoted by P). The double-stranded secondary structure has a feature denoted by X, X = [n1, n2, n3 . . . ], with n1, n2, . . . indicating positions of a structure X, where the editing site is at 0, −n indicates that the position is an n-th base upstream of the editing site, and n indicates that the position is an n-th base downstream of the editing site.

[0174] When the double-stranded secondary structure X is M, M=[n1, n2, n3 . . . ] indicates that mismatches are present at positions of n1, n2, n3 . . . from the editing site. When the double-stranded secondary structure X is W, W=[n1, n2, n3 . . . ] indicates that wobble base pairs are present at positions of n1, n2, n3 . . . from the editing site. When the double-stranded secondary structure X is D, D=[n1, n2, n3 . . . ] indicates that deletions are present at positions of n1, n2, n3 . . . from the editing site. When X is Ii, Ii=[n1, n2], with i being any positive integer indicating that i bases are inserted between n1 and n2 from the editing site. When the double-stranded secondary structure X is Li, Li=[n1 to n2, n3 to n4 . . . ], with i being any positive integer indicating that internal loops having a size of i nt are formed in position ranges of n1 to n2, n3 to n4 . . . from the editing site. In any double-stranded secondary structure, all positions are P except where X is one or more of M, W, D, Ii, and Li.

[0175] Table 2 is shown at the end of the specification, which is a part of the present disclosure, and is incorporated herein by reference in its entirety.

[0176] The results showed that the mcRNAs designed with different combinations of mimic domains and binding domains by simulating the secondary structures of the present disclosure were higher than structureless mcRNAs, different mimic domain lengths from 41 nt to 91 nt did not significantly affect the editing levels, and the editing levels of all the mcRNAs were high editing levels of 30% to 70%. This example demonstrated that mcRNA sequences higher than structureless ones could be selected from the 151 nt long mcRNAs designed based on the secondary structures of the present disclosure.

### Example 2. Design of 41 nt Long mcRNA by MASSA Method to Edit Different Sites of Human GAPDH Gene

[0177] This example was intended to design, using the MASSA method, a series of mcRNAs according to the features of the secondary structures of the present disclosure for different base motifs for verification of the editing effects thereof. The names of the reference secondary structures and the mcRNA sequences are shown in Table 2, and the features of the reference secondary structures are shown in Table 1. In this example, the A bases of 10 sites of GAPDH were randomly selected to verify the editing effects of the mcRNAs designed according to the features of the secondary structure. The 10 sites were as follows. The motif at position 787 of GAPDH was a UAG motif, and the mcRNAs designed for this motif were mcRNA1206 to mcRNA1871, with the secondary structures of the reference substrates and the features thereof shown in Table 1. The motif at position 1257 was UAU, and the mcRNAs designed for this motif were mcRNA3881 to mcRNA4540, with the secondary structures of the reference substrates and the features thereof shown in Table 1. The motif at position 1275 was UAC, and the mcRNAs designed for this motif were mcRNA4541 to mcRNA5200, with the secondary structures of the reference substrates and the features thereof shown in Table 1. The motif at position 1323 was a UAA motif, and the mcRNAs designed for this motif were mcRNA1 to mcRNA660, with the secondary structures of the reference substrates and the features thereof shown in Table 1. The motif at position 816 was an AAC motif, and the mcRNAs designed for this motif were mcRNA8157 to mcRNA8789, with the secondary structures of the reference substrates and the features thereof shown in Table 1. The bases at position 873 was in an AAG motif, and the mcRNAs designed for this motif were mcRNA7516 to mcRNA8156, with the secondary structures of the reference substrates and the features thereof shown in Table 1. The motif at position 860 was a CAC motif, and the mcRNAs designed for this motif were mcRNA5861 to mcRNA6520, with the secondary structures of the reference substrates and the features thereof shown in Table 1. The motif at position 971 was a CAA motif, and the mcRNAs designed for this motif were mcRNA5201 to mcRNA5860, with the secondary structures of the reference substrates and the features thereof shown in Table 1.

[0178] In this example, different editing modes were designed to further verify the editing effects of the mcRNAs designed according to the secondary structures, with the specific design shown in FIG. 4. The design mainly had three patterns. The first one was to extend, as the length of the mimic domain, 6 bases upstream and 14 bases downstream with the editing site as the center. The second one was to extend, as the length of the mimic domain, 10 bases upstream and 10 bases downstream with the editing site as the center. The third one was to extend, as the length of the mimic domain, 14 bases upstream and 6 bases downstream with the editing site as the center. In the first pattern, there was a binding domain of 20 bases downstream of the editing site. In the second pattern, there was a binding domain of 10 bases at each of two ends. In the third mode, there was a binding domain of 20 bases upstream of the editing site. In each pattern, there would be a structureless mcRNA of the same length, and there would be a base A-C mismatch at the opposite site to the editing site. The lengths of the reference designs were all 41 nt. Sequences were designed and the editing levels of the mcRNAs were verified with reference to the approaches in Example 1 (FIGS. 5 to 12).

[0179] The results showed that the combinations of the mimic domain and binding domain lengths in different patterns in this example could allow for selection of a large number of mcRNA sequences higher than structureless ones at different sites and on different motifs. Specifically, for the UAN motif shown in FIG. 5, the editing levels of the structureless mcRNA of the UAU motif in the three patterns were from 30% to 55%, and the editing levels of the structureless mcRNAs of the other three motifs were below 30%. There were 59% mcRNAs with the simulated secondary structure features designed in the UAG motif higher than one of three structureless mcRNAs, and there were 76% mcRNAs with the simulated secondary structure features designed in the UAA motif higher than one of three structureless mcRNAs. In order to further analyze the obtained mcRNA editing effects, the editing at the target site and the A bases upstream and downstream by the mcRNA at each site was compared in parallel, and a comparison on editing effect was made between the editing and off-target editing of each sequence using heat maps (as shown in FIG. 6). The results showed that there was high editing efficiency at the target site on the UAN motif, while there was only weak off-target editing upstream and downstream, indicating that the mcRNA designed with the secondary structure had high specificity and targeted editing capability. This was similar on the UAU and UAC motifs, except that on the UAA motif, the high editing mcRNA could edit one A base downstream of the editing site to a certain extent.

[0180] The CAN motif shown in FIG. 7 included the CAA motif and the CAC motif, where the editing level of the structureless mcRNA of the CAA motif was about 5%, and the editing level of the structureless mcRNA of the CAC motif was below 5%. The mcRNAs with structural characteristics designed according to the secondary structures of the present disclosure could achieve more than 20% editing at most, and a proportion of those with editing levels exceeding that of one of three structureless mcRNAs was 55% in the CAA motif and 94% in the CAC motif. The editing of the target site on the CAA motif was significantly higher than the off-target editing upstream and downstream, while there was a certain degree of off-target editing on the CAC motif (shown in FIG. 8).

[0181] The AAN motif shown in FIG. 9 included the AAG motif and the AAC motif. In the two motifs, the editing levels of the structureless mcRNAs were both about 5%. The mcRNAs with structural characteristics designed according to the secondary structures of the present disclosure could achieve up to 40% editing, and a proportion of those with editing levels exceeding that of one of three structureless mcRNAs was 95% in the AAG motif and 61% in the AAC motif. The mcRNA on the AAG motif exhibited almost no off-target editing, and there was a certain degree of off-target editing at two sites downstream of the editing site on the AAC motif (shown in FIG. 10).

[0182] The GAN motif shown in FIG. 11 included the GAG motif and the GAA motif. In the two motifs, the editing levels of the structureless mcRNAs were both below 5%, and the structureless mcRNAs almost had no editing effect in the GAA motif. The mcRNAs with structural characteristics designed according to the secondary structures of the present disclosure could achieve up to 20% editing in the GAG motif and up to 8% editing in the GAA motif, and a proportion of those with editing levels exceeding that of one of three structureless mcRNAs was 74% in the GAG motif and 94% in the GAA motif. The mcRNAs on the GAG and GAA motifs both had a certain degree of off-target editing, and the specific mcRNA target site editing on the GAA motif was low, but the off-target editing effect at the next position to the editing site was higher than that of the target site (shown in FIG. 12).

[0183] The results of this example demonstrated that the mcRNAs obtained based on the secondary structures of the present disclosure in combination with the method of designing mcRNAs could achieve high-efficiency editing on the target sites of different motifs, and the editing levels of more than 95% of structured mcRNAs at specific sites were higher than those of structureless mcRNAs.

### Example 3. Design of mcRNAs of Different Lengths by MASSA Method to Edit Different Sites of Human ATP7B Gene

[0184] This example was intended to verify that mcRNAs with high editing activity could be designed on the human ATP7B gene based on the features of the secondary structures of the present disclosure. A mutation in the ATP7B gene is the main cause of hepatolenticular degeneration. In this example, the A base at position 1532 on the ATP7B gene was selected. The C base upstream of this site was mutated to the T base, so the motif where the editing site after mutation was located was the UAG motif. Moreover, the G to A mutation site at base 3316 was also selected, and the motif of the site was the AAU motif. In this example, 31 nt and 41 nt were selected upstream and downstream of the editing site for designing the mcRNAs by the MASSA method with respect to the substrate secondary structures of the specific motifs, and the editing level of each mcRNA at the target site was measured by the high-throughput method. In this example, the mcRNA sequences designed for the UAG motif on the ATP7B gene were mcRNA2870 to mcRNA5860 (as shown in Table 2), with the reference secondary structures shown in Table 1.

[0185] The results showed that, as shown in FIG. 13, the 41 nt long mcRNA with structural features on the UAG motif could achieve up to 50% editing, while the 41 nt mcRNA without structural features achieved the editing level below 5%, and the 31 nt long mcRNA with structural features on the UAG motif exhibited the editing capability significantly lower than that at the length of 41 nt and could only achieve the editing level of about 20% at most, while the 31 nt structureless mcRNA also achieved the editing level below 5%. Compared with the structureless mcRNAs, the proportion of structured mcRNAs with higher editing levels than structureless ones was 51% for 41 nt and 17% for 31 nt. As shown in FIG. 14, the editing levels of all mcRNAs on the UAG motif of the ATP7B gene to the target sites were much higher than upstream and downstream off-target editing levels, and there was less off-target editing only upstream of the editing site.

[0186] As shown in FIG. 15, both 41 nt and 31 nt mcRNAs exhibited only weak editing capability on the AAU motif of the ATP7B gene, with the editing levels basically within 10%. Compared with the structured mcRNAs, the structureless mcRNAs exhibited almost no editing capability, and the proportion of mcRNAs with higher editing levels than structureless ones was 53% for the length of 41 nt and 14% for the length of 31 nt. As shown in FIG. 16, the A base upstream of the editing site on the AAU motif of the ATP7B gene was slightly off-target edited. This example further demonstrated that where the structureless mcRNAs could not be edited, by simulating the secondary structures of the present disclosure, about 15% editing at most could be achieved on the site difficult to edit.

[0187] The above results further demonstrated that the secondary structures of the present disclosure could be applied to edit different motifs on different genes.

### Example 4. Design of mcRNA by MASSA Method to Edit Human FGFR Gene

[0188] This example was intended to verify that mcRNAs capable of efficient editing could be designed on the human FGFR gene based on the secondary structures of the present disclosure. Mutations in the FGFR gene are the causes of diseases such as achondroplasia, fatal osteodysplasia, and nanism. In this example, the site G358R of the FGFR gene having a G to A mutation was selected as the editing site, so the motif of the editing site after mutation was the CAG motif. In this example, 31 nt and 41 nt were selected upstream and downstream of the editing site for designing the mcRNAs by the MASSA method with respect to the substrate secondary structures of the specific motifs, and the editing level of each mcRNA at the target site was measured by the high-throughput method. In this example, the mcRNA sequences designed for this site were mcRNA13097 to mcRNA14086 (as shown in Table 2), with the reference secondary structures shown in Table 2.

[0189] The results showed that, as shown in FIG. 17, the editing levels of both 41 nt and 31 nt structureless mcRNAs on the CAG motif of the FGFR gene were only about 2%, and the mcRNAs designed based on the secondary structures of the present disclosure could achieve up to 35% editing at the length of 41 nt, while the 31 nt mcRNAs could achieve 10% editing. In all mcRNAs, there was significant off-target editing at two sites upstream of the editing site, but there was no off-target editing at all downstream of the editing site. Overall comparison showed that the editing levels of most mcRNA sequences designed based on the 41 nt target sequence were below 20%, the editing levels of almost all mcRNAs designed based on the 31 nt target sequence were below 10%, and among the 41 nt mcRNAs, the proportion of those with the editing levels higher than that of the structureless mcRNAs was about 50%. As shown in FIG. 18, the mcRNA of this CAG motif of FGFR exhibited completely no off-target editing downstream of the editing site, but exhibited weak off-target editing upstream of the editing site. This example once again demonstrated that mcRNAs capable of efficient editing could be designed on different genes and on different motifs based on the secondary structures of the present disclosure.

### Example 5. Design of mcRNA by MASSA Method to Edit Human APC Gene

[0190] This example was intended to verify that mcRNAs capable of efficient editing could be designed on the human APC gene based on the secondary structures of the present disclosure. The APC gene is a tumor suppressor gene, and in some cases, the function of the protein will be lost due to mutations. For example, the G base at site 2627 of the gene is mutated to the T base, which causes this position and following two bases to produce a stop codon, thus affecting the translation of the protein. In this example, the A base next to this site was selected for editing, and the motif was GAG. In addition, a mutation from the C base to the T base is often produced at position 4099 of the gene, which also produces a stop codon. Next A base to this site was selected as the second editing site, and the motif was UAG. Another high-frequency mutation site is position 4348 where the C base is mutated to the T base, which also produces a stop codon. The last two A bases of this site were selected as the editing site, and the motif was GAG. In this example, 31 nt and 41 nt were selected upstream and downstream of the editing site for designing the mcRNAs by the MASSA method with respect to the substrate secondary structures of the specific motifs, and the editing level of each mcRNA at the target site was measured by the high-throughput method. The mcRNA sequences designed for the first editing site were mcRNA10110 to mcRNA11094 (as shown in Table 2), with the structures of the corresponding reference secondary structures shown in Table 1. The mcRNA sequences designed for the second editing site were mcRNA1872 to mcRNA2869 (as shown in Table 2), with the structures of the reference secondary structures shown in Table 1. The mcRNA sequences designed for the third editing site were mcRNA11095 to mcRNA12090 (as shown in Table 2), with the structures of the reference secondary structure shown in Table 1.

[0191] The results showed that, as shown in FIGS. 19 to 24, the editing levels of both 41 nt and 31 nt structureless mcRNAs on the UAG motif of the APC gene were only about 10%, and the mcRNAs designed based on the secondary structures of the present disclosure could achieve approximate 80% editing at most at the length of 41 nt, while the 31 nt mcRNAs could achieve 60% editing at most (FIG. 21). Different from this site, the editing levels of the other two GAG sites were lower than that of the UAG motif as a whole, with the overall editing of the 41 nt mcRNAs at the first site within 30% and the that of 31 n mcRNAs within 10%, and both 41 nt and 31 nt structureless mcRNAs at this site exhibited almost no editing (FIG. 19). The overall editing of the third editing site was close to that of the first editing site (FIG. 23). At the three sites, the mcRNAs capable of high editing for the target sites exhibited low off-target effects, where the off-target effect was lowest for the UAG motif, and at two sites of the GAG motif, few mcRNAs exhibited off-target editing upstream and downstream (as shown in FIGS. 20, 22, and 24). Among the three editing sites on the APC gene, the proportion of the 41 nt mcRNAs designed for the first GAG motif with higher editing levels than structureless mcRNAs was 36% in the total mcRNAs, and the proportion of the 31 nt mcRNAs was relatively low, only 8%. The proportion of the 41 nt mcRNAs designed for the second UAG motif with higher editing levels than structureless mcRNAs was 81% in the total mcRNAs, and the proportion of the 31 nt mcRNAs was 63%. The proportion of the 41 nt mcRNAs designed for the third GAG motif with higher editing levels than structureless mcRNAs was 61% in the total mcRNAs, and the proportion of the 31 nt mcRNAs was 29%. This example once again demonstrated that mcRNAs capable of efficient editing could be designed on different genes and on different motifs based on the secondary structures of the present disclosure.

### Example 6. Design of mcRNA by MASSA Method to Edit Human TP53 Gene

[0192] This example was intended to verify that mcRNAs capable of efficient editing could be designed on the human TP53 gene based on the secondary structures of the present disclosure. The TP53 gene is a tumor suppressor gene, and in some cases, the function of the protein will be lost due to mutations. For example, the G base at site 524 of the gene is mutated to the A base such that the protein coding sequence is changed. In this example, this site was selected for editing, and the motif was CAC. In addition, a mutation from the G base to the A base is often produced at position 743 of this gene. This site was selected as the second editing site, and the motif was CAG. Another high-frequency mutation site is position 818 where the G base is mutated to the A base. This site was selected as the editing site, and the motif was CAU. In this example, 31 nt and 41 nt were selected upstream and downstream of these three editing sites for designing the mcRNAs by the MASSA method with respect to the substrate secondary structures of the specific motifs, and the editing level of each mcRNA at the target site was measured by the high-throughput method. The mcRNA sequences designed for the first editing site were mcRNA6521 to mcRNA7515 (as shown in Table 2), with the structures of the corresponding reference secondary structures shown in Table 1. The mcRNA sequences designed for the second editing site were mcRNA14087 to mcRNA15086 (as shown in Table 2), with the structures of the reference secondary structures shown in Table 1. The mcRNA sequences designed for the third editing site were mcRNA15087 to mcRNA16083 (as shown in Table 2), with the structures of the reference secondary structure shown in Table 1.

[0193] The results showed that, as shown in FIGS. 25 to 30, the editing motiy on the TP53 gene was CAN, where the CAG motif and the CAU motif exhibited higher overall editing effects than the CAC motif, the editing levels of both 41 nt and 31 nt structureless mcRNAs on the CAC motif were only about 2%, and the mcRNAs designed based on the secondary structures of the present disclosure could achieve approximate 35% editing at most at the length of 41 nt, while the 31 nt mcRNAs could achieve 10% editing at most (FIG. 25). On the CAG motif, the structureless mcRNAs exhibited only less than 10% editing under different length conditions, while the mcRNAs designed according to the secondary structures could achieve up to 70% editing at the length of 41 nt and up to 20% editing at the length of 31 nt (FIG. 27). On the CAU motif, the structureless mcRNAs exhibited almost no editing, while the mcRNAs designed according to the secondary structures could achieve up to 60% editing at the length of 41 nt and up to 30% editing at the length of 31 nt (FIG. 29). At the three sites, the mcRNAs capable of high editing for the target sites exhibited low off-target effects, where the off-target effect was lowest for the CAG motif, and on the CAG motif and the CAU motif, few mcRNAs exhibited off-target editing upstream (FIGS. 26, 28, and 30). Among the three editing sites on the TP53 gene, the proportion of the 41 nt mcRNAs designed for the first CAC motif with higher editing levels than structureless mcRNAs was 40% in the total mcRNAs, and the proportion of the 31 nt mcRNAs was relatively low, only 10%. The proportion of the 41 nt mcRNAs designed for the second CAG motif with higher editing levels than structureless mcRNAs was 57% in the total mcRNAs, and the proportion of the 31 nt mcRNAs was 10%. The proportion of the 41 nt mcRNAs designed for the third CAU motif with higher editing levels than structureless mcRNAs was 57% in the total mcRNAs, and the proportion of the 31 nt mcRNAs was 13%. This example once again demonstrated that mcRNAs capable of efficient editing could be designed on different genes and on different motifs based on the secondary structures of the present disclosure.

[0194] Based on the above examples, it was verified that the mcRNAs with high editing levels could be designed on different genes from different secondary structures. From the comparison data, it could be seen that the mcRNAs with high editing levels could be designed on different genes from the same secondary structure. For example, the site based on the UAG motif includes the GAPDH, APC, and ATP7B genes. As shown in Table 3, it was further demonstrated that the mcRNAs with high editing levels for any target site could be designed from the secondary structures of the present disclosure.

TABLE 3
Editing Levels of mcRNAs of Same Secondary
Structure on Different Genes

| | | | Average |
|---|---|---|---|
| Secondary | Editing | | Editing |
| Structure No. | Gene | mcRNA Sequence | Level |
| Struc154 | ATP7B | SEQ ID NO.: 16084 | 0.4085 |
| Struc154 | APC | SEQ ID NO.: 16085 | 0.697 |
| Struc154 | GAPDH | SEQ ID NO.: 16086 | 0.45 |
| Struc162 | ATP7B | SEQ ID NO.: 16087 | 0.374 |
| Struc162 | GAPDH | SEQ ID NO.: 16088 | 0.435 |
| Struc162 | APC | SEQ ID NO.: 16089 | 0.711 |
| Struc157 | ATP7B | SEQ ID NO.: 16090 | 0.374 |
| Struc157 | APC | SEQ ID NO.: 16091 | 0.681 |
| Struc157 | GAPDH | SEQ ID NO.: 16092 | 0.4465 |
| Struc146 | GAPDH | SEQ ID NO.: 16093 | 0.574 |
| Struc146 | ATP7B | SEQ ID NO.: 16094 | 0.421 |
| Struc146 | APC | SEQ ID NO.: 16095 | 0.4295 |
| Struc145 | ATP7B | SEQ ID NO.: 16096 | 0.301 |
| Struc145 | APC | SEQ ID NO.: 16097 | 0.5255 |
| Struc145 | GAPDH | SEQ ID NO.: 16098 | 0.5815 |
| Struc144 | APC | SEQ ID NO.: 16099 | 0.577 |
| Struc144 | GAPDH | SEQ ID NO.: 16100 | 0.6615 |
| Struc144 | ATP7B | SEQ ID NO.: 16101 | 0.164 |
| Struc155 | GAPDH | SEQ ID NO.: 16102 | 0.448 |
| Struc155 | ATP7B | SEQ ID NO.: 16103 | 0.254 |
| Struc155 | APC | SEQ ID NO.: 16104 | 0.6335 |
| Struc165 | GAPDH | SEQ ID NO.: 16105 | 0.421 |
| Struc165 | APC | SEQ ID NO.: 16106 | 0.5885 |
| Struc165 | ATP7B | SEQ ID NO.: 16107 | 0.269 |
| Struc203 | APC | SEQ ID NO.: 16108 | 0.6205 |
| Struc203 | ATP7B | SEQ ID NO.: 16109 | 0.303 |
| Struc203 | GAPDH | SEQ ID NO.: 16110 | 0.3365 |
| Struc169 | ATP7B | SEQ ID NO.: 16111 | 0.303 |
| Struc169 | GAPDH | SEQ ID NO.: 16112 | 0.4155 |
| Struc169 | APC | SEQ ID NO.: 16113 | 0.5405 |
| Struc176 | APC | SEQ ID NO.: 16114 | 0.72 |
| Struc176 | GAPDH | SEQ ID NO.: 16115 | 0.3985 |
| Struc176 | ATP7B | SEQ ID NO.: 16116 | 0.1285 |
| Struc195 | ATP7B | SEQ ID NO.: 16117 | 0.259 |
| Struc195 | GAPDH | SEQ ID NO.: 16118 | 0.358 |
| Struc195 | APC | SEQ ID NO.: 16119 | 0.622 |
| Struc204 | GAPDH | SEQ ID NO.: 16120 | 0.3325 |
| Struc204 | ATP7B | SEQ ID NO.: 16121 | 0.326 |
| Struc204 | APC | SEQ ID NO.: 16122 | 0.5365 |
| Struc255 | GAPDH | SEQ ID NO.: 16123 | 0.249 |
| Struc255 | APC | SEQ ID NO.: 16124 | 0.5405 |
| Struc255 | ATP7B | SEQ ID NO.: 16125 | 0.3585 |
| Struc159 | APC | SEQ ID NO.: 16126 | 0.5245 |
| Struc159 | ATP7B | SEQ ID NO.: 16127 | 0.1765 |
| Struc159 | GAPDH | SEQ ID NO.: 16128 | 0.4455 |
| Struc164 | GAPDH | SEQ ID NO.: 16129 | 0.428 |
| Struc164 | APC | SEQ ID NO.: 16130 | 0.5115 |
| Struc164 | ATP7B | SEQ ID NO.: 16131 | 0.204 |
| Struc186 | ATP7B | SEQ ID NO.: 16132 | 0.214 |
| Struc186 | GAPDH | SEQ ID NO.: 16133 | 0.373 |
| Struc186 | APC | SEQ ID NO.: 16134 | 0.548 |
| Struc216 | ATP7B | SEQ ID NO.: 16135 | 0.226 |
| Struc216 | APC | SEQ ID NO.: 16136 | 0.599 |
| Struc216 | GAPDH | SEQ ID NO.: 16137 | 0.308 |
| Struc168 | ATP7B | SEQ ID NO.: 16138 | 0.109 |
| Struc168 | APC | SEQ ID NO.: 16139 | 0.603 |
| Struc168 | GAPDH | SEQ ID NO.: 16140 | 0.4185 |
| Struc215 | ATP7B | SEQ ID NO.: 16141 | 0.207 |
| Struc215 | GAPDH | SEQ ID NO.: 16142 | 0.309 |
| Struc215 | APC | SEQ ID NO.: 16143 | 0.6105 |
| Struc158 | ATP7B | SEQ ID NO.: 16144 | 0.196 |
| Struc158 | GAPDH | SEQ ID NO.: 16145 | 0.446 |
| Struc158 | APC | SEQ ID NO.: 16146 | 0.48 |
| Struc163 | APC | SEQ ID NO.: 16147 | 0.372 |
| Struc163 | ATP7B | SEQ ID NO.: 16148 | 0.3045 |
| Struc163 | GAPDH | SEQ ID NO.: 16149 | 0.4285 |
| Struc220 | GAPDH | SEQ ID NO.: 16150 | 0.3005 |
| Struc220 | APC | SEQ ID NO.: 16151 | 0.4735 |
| Struc220 | ATP7B | SEQ ID NO.: 16152 | 0.33 |
| Struc206 | GAPDH | SEQ ID NO.: 16153 | 0.3255 |
| Struc206 | ATP7B | SEQ ID NO.: 16154 | 0.287 |
| Struc206 | APC | SEQ ID NO.: 16155 | 0.49 |
| Struc150 | APC | SEQ ID NO.: 16156 | 0.4785 |
| Struc150 | GAPDH | SEQ ID NO.: 16157 | 0.496 |
| Struc150 | ATP7B | SEQ ID NO.: 16158 | 0.1205 |
| Struc171 | GAPDH | SEQ ID NO.: 16159 | 0.408 |
| Struc171 | APC | SEQ ID NO.: 16160 | 0.5985 |
| Struc171 | ATP7B | SEQ ID NO.: 16161 | 0.078 |
| Struc179 | GAPDH | SEQ ID NO.: 16162 | 0.389 |
| Struc179 | APC | SEQ ID NO.: 16163 | 0.617 |
| Struc179 | ATP7B | SEQ ID NO.: 16164 | 0.077 |
| Struc148 | APC | SEQ ID NO.: 16165 | 0.438 |
| Struc148 | ATP7B | SEQ ID NO.: 16166 | 0.1005 |
| Struc148 | GAPDH | SEQ ID NO.: 16167 | 0.5345 |
| Struc161 | GAPDH | SEQ ID NO.: 16168 | 0.4395 |
| Struc161 | ATP7B | SEQ ID NO.: 16169 | 0.06 |
| Struc161 | APC | SEQ ID NO.: 16170 | 0.572 |
| Struc185 | GAPDH | SEQ ID NO.: 16171 | 0.3745 |
| Struc185 | ATP7B | SEQ ID NO.: 16172 | 0.2685 |
| Struc185 | APC | SEQ ID NO.: 16173 | 0.397 |
| Struc175 | APC | SEQ ID NO.: 16174 | 0.4995 |
| Struc175 | ATP7B | SEQ ID NO.: 16175 | 0.116 |
| Struc175 | GAPDH | SEQ ID NO.: 16176 | 0.3995 |
| Struc172 | APC | SEQ ID NO.: 16177 | 0.427 |
| Struc172 | ATP7B | SEQ ID NO.: 16178 | 0.18 |
| Struc172 | GAPDH | SEQ ID NO.: 16179 | 0.4075 |
| Struc160 | GAPDH | SEQ ID NO.: 16180 | 0.4395 |
| Struc160 | APC | SEQ ID NO.: 16181 | 0.514 |
| Struc160 | ATP7B | SEQ ID NO.: 16182 | 0.051 |
| Struc232 | GAPDH | SEQ ID NO.: 16183 | 0.2895 |
| Struc232 | APC | SEQ ID NO.: 16184 | 0.548 |
| Struc232 | ATP7B | SEQ ID NO.: 16185 | 0.1645 |
| Struc249 | GAPDH | SEQ ID NO.: 16186 | 0.259 |
| Struc249 | APC | SEQ ID NO.: 16187 | 0.5305 |
| Struc249 | ATP7B | SEQ ID NO.: 16188 | 0.2045 |
| Struc233 | GAPDH | SEQ ID NO.: 16189 | 0.287 |
| Struc233 | APC | SEQ ID NO.: 16190 | 0.551 |
| Struc233 | ATP7B | SEQ ID NO.: 16191 | 0.155 |
| Struc222 | GAPDH | SEQ ID NO.: 16192 | 0.297 |
| Struc222 | ATP7B | SEQ ID NO.: 16193 | 0.2135 |
| Struc222 | APC | SEQ ID NO.: 16194 | 0.4705 |
| Struc149 | APC | SEQ ID NO.: 16195 | 0.425 |
| Struc149 | ATP7B | SEQ ID NO.: 16196 | 0.05 |
| Struc149 | GAPDH | SEQ ID NO.: 16197 | 0.5015 |
| Struc196 | ATP7B | SEQ ID NO.: 16198 | 0.195 |
| Struc196 | APC | SEQ ID NO.: 16199 | 0.4265 |
| Struc196 | GAPDH | SEQ ID NO.: 16200 | 0.353 |
| Struc177 | ATP7B | SEQ ID NO.: 16201 | 0.128 |
| Struc177 | APC | SEQ ID NO.: 16202 | 0.447 |
| Struc177 | GAPDH | SEQ ID NO.: 16203 | 0.396 |
| Struc193 | GAPDH | SEQ ID NO.: 16204 | 0.364 |
| Struc193 | APC | SEQ ID NO.: 16205 | 0.53 |
| Struc193 | ATP7B | SEQ ID NO.: 16206 | 0.0735 |
| Struc207 | APC | SEQ ID NO.: 16207 | 0.533 |
| Struc207 | GAPDH | SEQ ID NO.: 16208 | 0.3225 |
| Struc207 | ATP7B | SEQ ID NO.: 16209 | 0.1095 |
| Struc151 | APC | SEQ ID NO.: 16210 | 0.3655 |
| Struc151 | GAPDH | SEQ ID NO.: 16211 | 0.4755 |
| Struc151 | ATP7B | SEQ ID NO.: 16212 | 0.119 |
| Struc259 | ATP7B | SEQ ID NO.: 16213 | 0.08 |
| Struc259 | APC | SEQ ID NO.: 16214 | 0.555 |
| Struc242 | ATP7B | SEQ ID NO.: 16215 | 0.1605 |
| Struc242 | APC | SEQ ID NO.: 16216 | 0.51 |
| Struc242 | GAPDH | SEQ ID NO.: 16217 | 0.2745 |
| Struc178 | GAPDH | SEQ ID NO.: 16218 | 0.394 |
| Struc178 | APC | SEQ ID NO.: 16219 | 0.233 |
| Struc213 | APC | SEQ ID NO.: 16220 | 0.3535 |
| Struc213 | ATP7B | SEQ ID NO.: 16221 | 0.276 |
| Struc213 | GAPDH | SEQ ID NO.: 16222 | 0.31 |
| Struc224 | APC | SEQ ID NO.: 16223 | 0.5035 |
| Struc224 | GAPDH | SEQ ID NO.: 16224 | 0.296 |
| Struc224 | ATP7B | SEQ ID NO.: 16225 | 0.134 |
| Struc231 | APC | SEQ ID NO.: 16226 | 0.463 |
| Struc231 | GAPDH | SEQ ID NO.: 16227 | 0.29 |
| Struc231 | ATP7B | SEQ ID NO.: 16228 | 0.17 |
| Struc205 | APC | SEQ ID NO.: 16229 | 0.4605 |
| Struc205 | ATP7B | SEQ ID NO.: 16230 | 0.13 |
| Struc205 | GAPDH | SEQ ID NO.: 16231 | 0.331 |
| Struc214 | GAPDH | SEQ ID NO.: 16232 | 0.3095 |
| Struc214 | ATP7B | SEQ ID NO.: 16233 | 0.213 |
| Struc214 | APC | SEQ ID NO.: 16234 | 0.396 |
| Struc221 | GAPDH | SEQ ID NO.: 16235 | 0.3005 |
| Struc221 | ATP7B | SEQ ID NO.: 16236 | 0.2045 |
| Struc221 | APC | SEQ ID NO.: 16237 | 0.4095 |
| Struc225 | APC | SEQ ID NO.: 16238 | 0.506 |
| Struc225 | ATP7B | SEQ ID NO.: 16239 | 0.1065 |
| Struc225 | GAPDH | SEQ ID NO.: 16240 | 0.2955 |
| Struc201 | APC | SEQ ID NO.: 16241 | 0.3965 |
| Struc201 | GAPDH | SEQ ID NO.: 16242 | 0.3405 |
| Struc201 | ATP7B | SEQ ID NO.: 16243 | 0.1625 |
| Struc229 | ATP7B | SEQ ID NO.: 16244 | 0.2325 |
| Struc229 | APC | SEQ ID NO.: 16245 | 0.3555 |
| Struc229 | GAPDH | SEQ ID NO.: 16246 | 0.292 |
| Struc181 | APC | SEQ ID NO.: 16247 | 0.366 |
| Struc181 | GAPDH | SEQ ID NO.: 16248 | 0.385 |
| Struc181 | ATP7B | SEQ ID NO.: 16249 | 0.113 |
| Struc191 | APC | SEQ ID NO.: 16250 | 0.3725 |
| Struc191 | GAPDH | SEQ ID NO.: 16251 | 0.366 |
| Struc191 | ATP7B | SEQ ID NO.: 16252 | 0.1095 |
| Struc244 | APC | SEQ ID NO.: 16253 | 0.4325 |
| Struc244 | GAPDH | SEQ ID NO.: 16254 | 0.2725 |
| Struc244 | ATP7B | SEQ ID NO.: 16255 | 0.1425 |
| Struc180 | GAPDH | SEQ ID NO.: 16256 | 0.3865 |
| Struc180 | APC | SEQ ID NO.: 16257 | 0.2805 |
| Struc180 | ATP7B | SEQ ID NO.: 16258 | 0.1805 |
| Struc209 | APC | SEQ ID NO.: 16259 | 0.4275 |
| Struc209 | ATP7B | SEQ ID NO.: 16260 | 0.086 |
| Struc209 | GAPDH | SEQ ID NO.: 16261 | 0.3185 |
| Struc247 | GAPDH | SEQ ID NO.: 16262 | 0.2685 |
| Struc247 | APC | SEQ ID NO.: 16263 | 0.453 |
| Struc247 | ATP7B | SEQ ID NO.: 16264 | 0.1075 |
| Struc235 | APC | SEQ ID NO.: 16265 | 0.415 |
| Struc235 | GAPDH | SEQ ID NO.: 16266 | 0.2825 |
| Struc235 | ATP7B | SEQ ID NO.: 16267 | 0.122 |
| Struc251 | APC | SEQ ID NO.: 16268 | 0.413 |
| Struc251 | ATP7B | SEQ ID NO.: 16269 | 0.1345 |
| Struc251 | GAPDH | SEQ ID NO.: 16270 | 0.2555 |
| Struc240 | ATP7B | SEQ ID NO.: 16271 | 0.0965 |
| Struc240 | APC | SEQ ID NO.: 16272 | 0.425 |
| Struc240 | GAPDH | SEQ ID NO.: 16273 | 0.277 |
| Struc188 | ATP7B | SEQ ID NO.: 16274 | 0.1145 |
| Struc188 | GAPDH | SEQ ID NO.: 16275 | 0.3705 |
| Struc188 | APC | SEQ ID NO.: 16276 | 0.3125 |
| Struc260 | ATP7B | SEQ ID NO.: 16277 | 0.163 |
| Struc260 | APC | SEQ ID NO.: 16278 | 0.3595 |
| Struc243 | ATP7B | SEQ ID NO.: 16279 | 0.0605 |
| Struc243 | APC | SEQ ID NO.: 16280 | 0.439 |
| Struc243 | GAPDH | SEQ ID NO.: 16281 | 0.274 |
| Struc199 | GAPDH | SEQ ID NO.: 16282 | 0.3435 |
| Struc199 | ATP7B | SEQ ID NO.: 16283 | 0.0815 |
| Struc199 | APC | SEQ ID NO.: 16284 | 0.3465 |
| Struc246 | ATP7B | SEQ ID NO.: 16285 | 0.104 |
| Struc246 | APC | SEQ ID NO.: 16286 | 0.3675 |
| Struc246 | GAPDH | SEQ ID NO.: 16287 | 0.27 |
| Struc253 | ATP7B | SEQ ID NO.: 16288 | 0.067 |
| Struc253 | APC | SEQ ID NO.: 16289 | 0.4125 |
| Struc253 | GAPDH | SEQ ID NO.: 16290 | 0.2525 |
| Struc237 | APC | SEQ ID NO.: 16291 | 0.345 |
| Struc237 | GAPDH | SEQ ID NO.: 16292 | 0.2805 |
| Struc237 | ATP7B | SEQ ID NO.: 16293 | 0.064 |
| Struc258 | APC | SEQ ID NO.: 16294 | 0.2565 |
| Struc258 | ATP7B | SEQ ID NO.: 16295 | 0.144 |
| Struc258 | GAPDH | SEQ ID NO.: 16296 | 0.215 |

### Example 5. Verification of mcRNA Editing Effect Obtained by High-Throughput Sequencing in HEK293 Cells

[0195] The measurement of the editing levels of the mcRNAs designed based on the secondary structures of the present disclosure to the target site was completed by high-throughput sequencing. In order to further confirm the authenticity of the results of mcRNAs with different editing levels obtained by high-throughput sequencing, verification was performed on a single one of the mcRNA sequences measured on the UAG motif of the GAPDH gene in Example 2 in this example. In this example, mcRNA sequences with editing levels ranging from 3.93% to 21.66% were selected through high-throughput screening. The sequence information was GAPDH-UAG-ST to GAPDH-UAG-S13 as shown in Table 4, and the corresponding chemically modified mcRNA sequences were GAPDH-UAG-M1 to GAPDH-UAG-M13. For the sequences selected by high-throughput screening, a single chemically modified mcRNA was transfected into cells to verify the editing levels (as shown in FIGS. 31 and 32). The stability of the modified mcRNAs was higher than that of the plasmid expressed mcRNAs, so the editing levels were higher than those selected by high-throughput screening. The chemical mcRNA modification strategy was to use phosphorothioate modification between bases and add 3 LNA modifications at each end. By analyzing the editing level selected by high-throughput screening and the editing level of a single modified mcRNA, it could be seen that they showed a strong correlation, with a correlation coefficient of up to 0.83 (as shown in FIG. 31), which further demonstrated the accuracy of the method of the present disclosure.

[0196] The editing levels of GAPDH-UAG-S1 to GAPDH-UAG-S12 in Table 4 were editing levels measured with a high-throughput hybrid system. The editing levels of GAPDH-UAG-M1 to GAPDH-UAG-M12 were the editing levels measured with a single RNA system.

TABLE 4
Table of Verification of Sequence Information by High-Throughput Screening

| | | Editing |
|---|---|---|
| Sequence No. | Sequence Information (SEQ ID NOs: 16297 to 16320) | Level (%) |
| GAPDH-UAG-S1 | CAUGGGUGCCCUUGGAAAGUGGUGCCAAGAAGUUGGGGGUGCAGGAAGUAU | 21.66 |
| GAPDH-UAG-M1 | LC*LA*LT*G*G*G*U*G*C*C*C*U*U*G*G*A*A*A*G*U*G*G*U*G*C*C*A*A*G*A*A*G*U*U*G*G*G*G*G*U*G*C*A*G*G*A*A*G*LT*LA*LT | 50 |
| GAPDH-UAG-S2 | CGUGGAUGACAUUGGCCCGGUGUAGCCAAGCAUAAAAAUUGGUGGGUGCAGGAGGUAU | 17.61 |
| GAPDH-UAG-M2 | LC*LG*LT*G*G*A*U*G*A*C*A*U*U*G*G*C*C*C*G*G*U*G*U*A*G*C*C*A*A*G*C*A*U*A*A*A*A*A*U*U*G*G*U*G*G*G*U*G*C*A*G*G*A*G*G* | 40 |
| | LT*LA*LT | |
| GAPDH-UAG-S3 | AUGACCUUGGCCAUGUGUGCCAAGCGGUGAGUGGUGCAGGA | 10.64 |
| GAPDH-UAG-M3 | LA*LT*LG*A*C*C*U*U*G*G*C*C*A*U*G*U*G*U*G*C*C*A*A*G*C*G*G*U*G*A*G*U*G*G*U*G*C*A*LG*LG*LA | 36 |
| GAPDH-UAG-S4 | AUGUCCUUGGCUAUGGGUUCCAAGCGGUUGGUGGUGUAGGA | 8.85 |
| GAPDH-UAG-M4 | LA*LT*LG*U*C*C*U*U*G*G*C*U*A*U*G*G*G*U*U*C*C*A*A*G*C*G*G*U*U*G*G*U*G*G*U*G*U*A*LG*LG*LA | 33 |
| GAPDH-UAG-S5 | CAUGGAUGACCUUAGACAGGGGUGUCAAGCAGGUGCGGGUUCAGGAGUUAG | 5.95 |
| GAPDH-UAG-M5 | LC*LA*LT*G*G*A*U*G*A*C*C*U*U*A*G*A*C*A*G*G*G*G*U*G*U*C*A*A*G*C*A*G*G*U*G*C*G*G*G*U*U*C*A*G*G*A*G*U*LT*LA*LG | 11 |
| GAPDH-UAG-S6 | AUGACCUUAGACAGGGGUGUCAAGCAGGUGCGGGUUCAGGA | 5.74 |
| GAPDH-UAG-M6 | LA*LT*LG*A*C*C*U*U*A*G*A*C*A*G*G*G*G*U*G*U*C*A*A*G*C*A*G*G*U*G*C*G*G*G*U*U*C*A*LG*LG*LA | 6 |
| GAPDH-UAG-S7 | AUGUCUUUGGCAAUGGGUGCCAAGAUUUGGAUGGUGCAGGA | 5.55 |
| GAPDH-UAG-M7 | LA*LT*LG*U*C*U*U*U*G*G*C*A*A*U*G*G*G*U*G*C*C*A*A*G*A*U*U*U*G*G*A*U*G*G*U*G*C*A*LG*LG*LA | 9 |
| GAPDH-UAG-S8 | CAGAGAUGAACUUGGUUAGGGGGUGCCAAGCAGAGAAGGUUGCCCUCGGCAU | 5.51 |
| GAPDH-UAG-M8 | LC*LA*LG*A*G*A*U*G*A*A*C*U*U*G*G*U*U*A*G*G*G*G*G*U*G*C*C*A*A*G*C*A*G*A*G*A*A*G*G*U*U*G*C*C*C*U*C*G*G*LC*LA*LT | 6 |
| GAPDH-UAG-S9 | AUGGCCUUGGAAAGGGAUGCCAAGCAGUUGGGGGUUCAGGG | 4.74 |
| GAPDH-UAG-M9 | LA*LT*LG*G*C*C*U*U*G*G*A*A*A*G*G*G*A*U*G*C*C*A*A*G*C*A*G*U*U*G*G*G*G*G*U*U*C*A*LG*LG*LG | 5 |
| GAPDH-UAG-S10 | CUUGGAAAGGGAUGCCAAGCAGUUGGGGGUU | 4.55 |
| GAPDH-UAG-M10 | LC*LT*LT*G*G*A*A*A*G*G*G*A*U*G*C*C*A*A*G*C*A*G*U*U*G*G*G*G*LG*LT*LT | 13 |
| GAPDH-UAG-S11 | AUGUCCUUGGCCAUGGGUUCCAAGCGAUGCGUGGUGUGGGA | 4.4 |
| GAPDH-UAG-M11 | LA*LT*LG*U*C*C*U*U*G*G*C*C*A*U*G*G*G*U*U*C*C*A*A*G*C*G*A*U*G*C*G*U*G*G*U*G*U*G*LG*LG*LA | 16 |
| GAPDH-UAG-S12 | AUGUCUUUGGCCAUGGGUGUCAAGCGGUGGGUGGUGUAGGA | 3.93 |
| GAPDH-UAG-M12 | LA*LT*LG*U*C*U*U*U*G*G*C*C*A*U*G*G*G*U*G*U*C*A*A*G*C*G*G*U*G*G*G*U*G*G*U*G*U*A*LG*LG*LA | 5 |

### Example 6. Design of mcRNA by MASSA Method to Edit Murine GAPDH Gene

[0197] In order to verify the applicability of the present disclosure to different species, in this example, mcRNAs with five lengths of 31 nt, 41 nt, 51 nt, 61 nt, and 71 nt were designed by the MASSA method for the site 1222 of the murine GAPDH gene, and verification was performed on a single mcRNA. The specific combinations of binding domain lengths and mimic domain lengths were as shown in FIG. 33. Two 31 nt mcRNAs were selected according to the secondary structure simulation, where the editing site was at its 3′ end, and the binding domains at both ends each had 5 bases. Six 41 nt mcRNAs were selected, where the editing site was in the center, and the binding domains at both ends each had 10 bases. Four 51 nt mcRNAs were selected, where the editing site was in the center, and the binding domains at both ends each had 10 bases. Four 61 nt mcRNAs were selected, where the editing site was in the center, and the binding domains at both ends each had 10 bases. Three 71 nt mcRNAs were selected, where the editing site was in the center, and the binding domains at both ends each had 10 bases. The names of the mcRNA reference secondary structures, the mcRNA sequences, and the modified sequences as mentioned above are shown in Table 5. This example was intended to verify the editing of the mcRNAs designed by the MASSA method in mouse cells, and compare the editing levels of the mcRNAs of different lengths. The method included the following steps.

1. Preparation of mcRNA Reference Substrate Structure

[0198] According to the mcRNA needs, the upstream and downstream lengths of the editing site were simulated to correspond to the reference substrate structures folded by RNAhybrid software, and the corresponding length range was taken. The sequence structure information within this range was reference secondary structure data. The strand where the editing site of the reference substrate was located was the editing strand of the reference substrate, and the other strand of the substrate was the complementary strand of the reference substrate.

2. Construction of mcRNA Sequence Complementarily Paired with Target Editing Site

[0199] Upstream and downstream mimic domains of corresponding lengths were selected with murine GAPDH site 1222 as the center. For example, the 31 nt mcRNA containing 5 nt binding domains was a complementarily paired sequence in which the editing site was extended 1 nt downstream and 19 nt upstream of position 25, where the strand where the site to be edited was located as the target editing strand, and the strand where the mcRNA was located was the mcRNA strand. For the 41 nt mcRNA containing 10 nt binding domains, the editing site was in the center and was extended 10 nt upstream and downstream.

3. Structural Design of Mimic Domain of mcRNA Sequence

[0200] The base pairs of each target editing strand and each mcRNA sequence strand were aligned with those of the editing strand of the reference substrate and its complementary strand one by one. When the bases of the two editing strands were the same, the mcRNA strand sequence was directly set as the complementary strand sequence of the reference substrate. When the bases of the two were different, they were designed to be the same structure. For example, there was a mismatch of one base at a certain site, and the base at the corresponding position of the mcRNA sequence strand was designed as a mismatch. The sequence design of the whole mimic domain was completed according to such a principle.

4. Structural Design of Binding Domain of mcRNA Sequence

[0201] On the basis of step 3, the complementarily paired sequences were directly extended at both ends of the mcRNA to complete the sequence design of the entire mcRNA, where the length of the binding domain could be customized as needed. In this example, a binding domain of 5 nt was designed at each end of the 31 nt sequence, and a binding domain of 10 nt was designed at each end of each of the 41 nt, 51 nt, 61 nt, and 71 nt sequences, as shown in FIG. 33.

5. Selection and Verification of mcRNA Sequence

[0202] The RNAfold software was used to calculate the minimum free energy of the pairing region of the mcRNA and target editing sequence, and the sequence information was exported, thereby completing the design of the mcRNA sequence library, and mcRNAs of different lengths were randomly selected to verify a single editing effect.

6. Selection and Verification of mcRNA Sequence

[0203] A plurality of mcRNAs of different lengths were randomly selected from the sequence library of step 5 for verification. In this example, the effects of different lengths and relative positions of the editing site on the mcRNAs on the editing levels were predominantly tested. The original mcRNA sequences and the modified mcRNA sequences are shown in Table 5. The synthesized mcRNA was transfected into mouse primary hepatocytes according to a transfection amount of 40 pmol per well of a 12-well plate. After 48 hours, the total RNAs were extracted and subsequently reverse-transcribed using random primers. Finally, the upstream and downstream sequences of the target site were amplified by PCR and subjected to Sanger sequencing.

[0204] As shown in FIGS. 34, 35, and 36, the results showed that the mcRNAs of different lengths for the murine GAPDH site 1222 could edit this site at high levels, and the mcRNAs of the five lengths could reach the editing levels of more than 90%.

[0205] The above results demonstrated that the mcRNAs designed by the MASSA method could edit specific sites of specific genes in mouse primary hepatocytes, and exhibited different editing effects with different combinations of mimic domain and binding domain lengths.

TABLE 5
Information of mcRNAs of Five Lengths Designed
for Murine GAPDH Site 1222 in This Example

| Secondary | | | Average |
|---|---|---|---|
| Structure | | | Editing |
| No. | mcRNA Sequence | mcRNA No. | Level |
| Struc221 | SEQ ID NO.: 16321 | Gapdh-31 nt-1 | 94% |
| Struc216 | SEQ ID NO.: 16322 | Gapdh-31 nt-2 | 82.40% |
| Struc195 | SEQ ID NO.: 16323 | Gapdh-41 nt-1 | 89% |
| Struc221 | SEQ ID NO.: 16324 | Gapdh-41 nt-2 | 91% |
| Struc169 | SEQ ID NO.: 16325 | Gapdh-41 nt-3 | 94% |
| Struc196 | SEQ ID NO.: 16326 | Gapdh-41 nt-4 | 65% |
| Struc175 | SEQ ID NO.: 16327 | Gapdh-41 nt-5 | 95% |
| Struc153 | SEQ ID NO.: 16328 | Gapdh-41 nt-6 | 85.60% |
| Struc195 | SEQ ID NO.: 16329 | Gapdh-51 nt-1 | 96% |
| Struc221 | SEQ ID NO.: 16330 | Gapdh-51 nt-2 | 95% |
| Struc1263 | SEQ ID NO.: 16331 | Gapdh-51 nt-3 | 63.30% |
| Struc164 | SEQ ID NO.: 16332 | Gapdh-51 nt-4 | 94% |
| Struc221 | SEQ ID NO.: 16333 | Gapdh-61 nt-1 | 95% |
| Struc162 | SEQ ID NO.: 16334 | Gapdh-61 nt-2 | 95% |
| Struc169 | SEQ ID NO.: 16335 | Gapdh-61 nt-3 | 94% |
| Struc1263 | SEQ ID NO.: 16336 | Gapdh-61 nt-4 | 93% |
| Struc221 | SEQ ID NO.: 16337 | Gapdh-71 nt-1 | 92% |
| Struc220 | SEQ ID NO.: 16338 | Gapdh-71 nt-2 | 96% |
| Struc175 | SEQ ID NO.: 16339 | Gapdh-71 nt-3 | 92.30% |

The application's sequence listing, which the Patent Office published only in electronic form, follows.

SEQUENCE LISTING (16339 sequences)

SEQ ID NO: 1 - RNA, 39 nt, synthetic construct
  source 1..39: mol_type = other RNA
tgtgctcttgctggggctggtgccagcggtctcactcct

SEQ ID NO: 2 - RNA, 41 nt, synthetic construct
  source 1..41: mol_type = other RNA
tgtgctcttgctggggctggtcgtctaggggtcttactcct

SEQ ID NO: 3 - RNA, 41 nt, synthetic construct
  source 1..41: mol_type = other RNA
tgtgctcttgctggggctggtgaaacaggggtctcacttct

SEQ ID NO: 4 - RNA, 39 nt, synthetic construct
  source 1..39: mol_type = other RNA
tgtgctcttgctggggctggtgccagcggtcttactcct

SEQ ID NO: 5 - RNA, 41 nt, synthetic construct
  source 1..41: mol_type = other RNA
tgtgctcttgctggggctggtggtcaaggaatctcactcct

SEQ ID NO: 6 - RNA, 41 nt, synthetic construct
  source 1..41: mol_type = other RNA
tgtgctcttgctggggctggtggcacaggaacctcactcct

SEQ ID NO: 7 - RNA, 41 nt, synthetic construct
  source 1..41: mol_type = other RNA
tgtgctcttgctggggctggtggcgcaggagtctcactcct

SEQ ID NO: 8 - RNA, 41 nt, synthetic construct
  source 1..41: mol_type = other RNA
tgtgctcttgctggggctggaggacccggggtcttactcct

SEQ ID NO: 9 - RNA, 41 nt, synthetic construct
  source 1..41: mol_type = other RNA
tgtgctcttgctggggctggtggcacaggagtctcactcct

SEQ ID NO: 10 - RNA, 41 nt, synthetic construct
  source 1..41: mol_type = other RNA
tgtgctcttgctggggctggtagtccagcagtctcactcct

SEQ ID NO: 11 - RNA, 41 nt, synthetic construct
  source 1..41: mol_type = other RNA
tgtgctcttgctggggctggtggactaggggtctcactact

SEQ ID NO: 12 - RNA, 41 nt, synthetic construct
  source 1..41: mol_type = other RNA
tgtgctcttgctggggctggtgtgttcagggtttcactcct

SEQ ID NO: 13 - RNA, 41 nt, synthetic construct
  source 1..41: mol_type = other RNA
tgtgctcttgctggggctggtggcagaggggtctcactcct

SEQ ID NO: 14 - RNA, 42 nt, synthetic construct
  source 1..42: mol_type = other RNA
tgtgctcttgctggggctggtgttcgagggggtctcactcct

SEQ ID NO: 15 - RNA, 41 nt, synthetic construct
  source 1..41: mol_type = other RNA
tgtgctcttgctggggctggtgggccagaggcctcactcct

SEQ ID NO: 16 - RNA, 41 nt, synthetic construct
  source 1..41: mol_type = other RNA
tgtgctcttgctggggctggtgtgttcagggttttactcct

SEQ ID NO: 17 - RNA, 44 nt, synthetic construct
  source 1..44: mol_type = other RNA
tgtgctcttgctggggctggtggtggggggtttcactataccct

SEQ ID NO: 18 - RNA, 41 nt, synthetic construct
  source 1..41: mol_type = other RNA
tgtgctcttgctggggctggtggtacaagggtcttactccc

SEQ ID NO: 19 - RNA, 41 nt, synthetic construct
  source 1..41: mol_type = other RNA
tgtgctcttgctggggctggtgttccaaggatctcactccc

SEQ ID NO: 20 - RNA, 41 nt, synthetic construct
  source 1..41: mol_type = other RNA
tgtgctcttgctggggctggtggtacagggatcttactcct

SEQ ID NO: 21 - RNA, 41 nt, synthetic construct
  source 1..41: mol_type = other RNA
ggctggtggtacagggttcttactccttggaggccatgtgg

SEQ ID NO: 22 - RNA, 41 nt, synthetic construct
  source 1..41: mol_type = other RNA
tgtgctcttgctggggctggtgatccaggggccttactcct

SEQ ID NO: 23 - RNA, 40 nt, synthetic construct
  source 1..40: mol_type = other RNA
tgtgctcttgctggggctggtcgttgggggtctcacttct

SEQ ID NO: 24 - RNA, 41 nt, synthetic construct
  source 1..41: mol_type = other RNA
tgtgctcttgctggggctggtgatccatggctctcactcct

SEQ ID NO: 25 - RNA, 41 nt, synthetic construct
  source 1..41: mol_type = other RNA
tgtgctcttgctggggctggtgggccagggatctcactcct

SEQ ID NO: 26 - RNA, 41 nt, synthetic construct
  source 1..41: mol_type = other RNA
ggctggtggttcaggggccttactccttggtggccatgtgg

SEQ ID NO: 27 - RNA, 41 nt, synthetic construct
  source 1..41: mol_type = other RNA
tgtgctcttgctggggctggtggtccagggctcttactcct

SEQ ID NO: 28 - RNA, 41 nt, synthetic construct
  source 1..41: mol_type = other RNA
tgtgctcttgctggggctggtggtacaagggtctcactccc

SEQ ID NO: 29 - RNA, 41 nt, synthetic construct
  source 1..41: mol_type = other RNA
tgtgctcttgctggggctggtctgccaggggtttcactact

SEQ ID NO: 30 - RNA, 41 nt, synthetic construct
  source 1..41: mol_type = other RNA
tgtgctcttgctggggctggtatcccaggggtcccactcct

SEQ ID NO: 31 - RNA, 41 nt, synthetic construct
  source 1..41: mol_type = other RNA
tgtgctcttgctggggctggtggtgcaggggtttcacttct

SEQ ID NO: 32 - RNA, 41 nt, synthetic construct
  source 1..41: mol_type = other RNA
tgtgctcttgctggggctggtagcccaggggtcccactcat

SEQ ID NO: 33 - RNA, 41 nt, synthetic construct
  source 1..41: mol_type = other RNA
tgtgctcttgctggggctggaggacccggggtctcactcct

SEQ ID NO: 34 - RNA, 41 nt, synthetic construct
  source 1..41: mol_type = other RNA
tgtgctcttgctggggctggtggtacaggggtttcacttct

SEQ ID NO: 35 - RNA, 42 nt, synthetic construct
  source 1..42: mol_type = other RNA
tgtgctcttgctggggctggaggtcccggaggtctcactcct

SEQ ID NO: 36 - RNA, 41 nt, synthetic construct
  source 1..41: mol_type = other RNA
tgtgctcttgctggggctggtcgtccagtagtctcactcct

SEQ ID NO: 37 - RNA, 41 nt, synthetic construct
  source 1..41: mol_type = other RNA
tgtgctcttgctggggctggtggtcccgggatctcactcct

SEQ ID NO: 38 - RNA, 41 nt, synthetic construct
  source 1..41: mol_type = other RNA
tgtgctcttgctggggctggtggtacagggttctcactcct

SEQ ID NO: 39 - RNA, 41 nt, synthetic construct
  source 1..41: mol_type = other RNA
tgtgctcttgctggggctggtggttcaggggccttactcct

SEQ ID NO: 40 - RNA, 41 nt, synthetic construct
  source 1..41: mol_type = other RNA
tgtgctcttgctggggctggtggttaaggggtctcactcct

SEQ ID NO: 41 - RNA, 41 nt, synthetic construct
  source 1..41: mol_type = other RNA
ggctggtggtccaggggccttactccttggaggccatgtgg

SEQ ID NO: 42 - RNA, 41 nt, synthetic construct
  source 1..41: mol_type = other RNA
tgtgctcttgctggggctggtgtccaaggggtctcactcgt

SEQ ID NO: 43 - RNA, 40 nt, synthetic construct
  source 1..40: mol_type = other RNA
tgtgctcttgctggggctggtggtcaaggggcctcactct

SEQ ID NO: 44 - RNA, 41 nt, synthetic construct
  source 1..41: mol_type = other RNA
tgtgctcttgctggggctggtggtcccgggatcttactcct

SEQ ID NO: 45 - RNA, 41 nt, synthetic construct
  source 1..41: mol_type = other RNA
ggctggtggttcagggttctcactcacccgaggccatgtgg

SEQ ID NO: 46 - RNA, 41 nt, synthetic construct
  source 1..41: mol_type = other RNA
tgtgctcttgctggggctggtggtccctgggcctcactcgt

SEQ ID NO: 47 - RNA, 41 nt, synthetic construct
  source 1..41: mol_type = other RNA
tgtgctcttgctggggctggcggcccaggggtctcacccct

SEQ ID NO: 48 - RNA, 41 nt, synthetic construct
  source 1..41: mol_type = other RNA
tgtgctcttgctggggctggtgatccaggggtctcactccc

SEQ ID NO: 49 - RNA, 41 nt, synthetic construct
  source 1..41: mol_type = other RNA
tgtgctcttgctggggctggtggtacagggatctcactcct

SEQ ID NO: 50 - RNA, 42 nt, synthetic construct
  source 1..42: mol_type = other RNA
ggctggtggtccagagggtcttactaattggcggccatgtgg

SEQ ID NO: 51 - RNA, 41 nt, synthetic construct
  source 1..41: mol_type = other RNA
ggctggtggtccaggggcttcacttcttggaggccatgtgg

SEQ ID NO: 52 - RNA, 41 nt, synthetic construct
  source 1..41: mol_type = other RNA
tgtgctcttgctggggctggtggtccatgtgtcccactcct

SEQ ID NO: 53 - RNA, 40 nt, synthetic construct
  source 1..40: mol_type = other RNA
tgtgctcttgctggggctggtggccaggggtctcactcct

SEQ ID NO: 54 - RNA, 41 nt, synthetic construct
  source 1..41: mol_type = other RNA
ggctggtggtgcagggtcctcactacttggaggccatgtgg

SEQ ID NO: 55 - RNA, 41 nt, synthetic construct
  source 1..41: mol_type = other RNA
tgtgctcttgctggggctggtggtccaggagtctcactcct

SEQ ID NO: 56 - RNA, 41 nt, synthetic construct
  source 1..41: mol_type = other RNA
tgtgctcttgctggggctggtagcccaggggtcccactcct

SEQ ID NO: 57 - RNA, 41 nt, synthetic construct
  source 1..41: mol_type = other RNA
ggctggtggtccaggagtcttacttcttggaggccatgtgg

SEQ ID NO: 58 - RNA, 42 nt, synthetic construct
  source 1..42: mol_type = other RNA
tgtgctcttgctggggctggtggtccacgggtctctactcct

SEQ ID NO: 59 - RNA, 41 nt, synthetic construct
  source 1..41: mol_type = other RNA
tgtgctcttgctggggctggtggtccagggatctcactcct

SEQ ID NO: 60 - RNA, 41 nt, synthetic construct
  source 1..41: mol_type = other RNA
tgtgctcttgctggggctggaggactaggggtctcactcct

SEQ ID NO: 61 - RNA, 41 nt, synthetic construct
  source 1..41: mol_type = other RNA
ggctggtggtccaggggtcccactcattggtggccatgtgg

SEQ ID NO: 62 - RNA, 41 nt, synthetic construct
  source 1..41: mol_type = other RNA
tgtgctcttgctggggctggtggtctaagggccttactcct

SEQ ID NO: 63 - RNA, 41 nt, synthetic construct
  source 1..41: mol_type = other RNA
tgtgctcttgctggggctggtggtccatgggtctcactccg

SEQ ID NO: 64 - RNA, 41 nt, synthetic construct
  source 1..41: mol_type = other RNA
tgtgctcttgctggggctgggggtccaaggatgtcactcct

SEQ ID NO: 65 - RNA, 41 nt, synthetic construct
  source 1..41: mol_type = other RNA
ggctggtggtccagggctcttactccttggaggccatgtgg

SEQ ID NO: 66 - RNA, 41 nt, synthetic construct
  source 1..41: mol_type = other RNA
tgtgctcttgctggggctggtggtccgttggccccactcct

SEQ ID NO: 67 - RNA, 41 nt, synthetic construct
  source 1..41: mol_type = other RNA
tgtgctcttgctggggctggtggttcaggggttccactcct

SEQ ID NO: 68 - RNA, 41 nt, synthetic construct
  source 1..41: mol_type = other RNA
tgtgctcttgctggggctggtgggccaagggtctcactcct

SEQ ID NO: 69 - RNA, 41 nt, synthetic construct
  source 1..41: mol_type = other RNA
tgtgctcttgctggggctggtgtccaaggggtcttactcgt

SEQ ID NO: 70 - RNA, 41 nt, synthetic construct
  source 1..41: mol_type = other RNA
ggctggtggtccaggagtcttactctttggaggccatgtgg

SEQ ID NO: 71 - RNA, 41 nt, synthetic construct
  source 1..41: mol_type = other RNA
tgtgctcttgctggggctggtggcgcagggtcctcactact

SEQ ID NO: 72 - RNA, 41 nt, synthetic construct
  source 1..41: mol_type = other RNA
tgtgctcttgctggggctggtggttcaggggcctcactcct

SEQ ID NO: 73 - RNA, 41 nt, synthetic construct
  source 1..41: mol_type = other RNA
tgtgctcttgctggggctggtggaccaggggtcttactccc

SEQ ID NO: 74 - RNA, 42 nt, synthetic construct
  source 1..42: mol_type = other RNA
tgtgctcttgctggggctggtggtcagaccagtctcactcat

SEQ ID NO: 75 - RNA, 42 nt, synthetic construct
  source 1..42: mol_type = other RNA
ggctggtggtccagggggtctcactaattggcggccatgtgg

SEQ ID NO: 76 - RNA, 41 nt, synthetic construct
  source 1..41: mol_type = other RNA
ggctggtggtcccgggatcttactccttggaggccatgtgg

SEQ ID NO: 77 - RNA, 41 nt, synthetic construct
  source 1..41: mol_type = other RNA
tgtgctcttgctggggctggtggtccacgggtcttactcct

SEQ ID NO: 78 - RNA, 41 nt, synthetic construct
  source 1..41: mol_type = other RNA
ggctggtggtccatgggtcttactccgtggaggccatgtgg

SEQ ID NO: 79 - RNA, 41 nt, synthetic construct
  source 1..41: mol_type = other RNA
tgtgctcttgctggggctggtggtccggggtactcactaat

SEQ ID NO: 80 - RNA, 41 nt, synthetic construct
  source 1..41: mol_type = other RNA
tgtgctcttgctggggctggtgttccaaggatcttactccc

SEQ ID NO: 81 - RNA, 40 nt, synthetic construct
  source 1..40: mol_type = other RNA
tgtgctcttgctggggctggtcagccaggggtctcactct

SEQ ID NO: 82 - RNA, 41 nt, synthetic construct
  source 1..41: mol_type = other RNA
tgtgctcttgctggggctggtggtccagaaggttccactct

SEQ ID NO: 83 - RNA, 41 nt, synthetic construct
  source 1..41: mol_type = other RNA
tgtgctcttgctggggctggtgatccaggggtcttactccc

SEQ ID NO: 84 - RNA, 41 nt, synthetic construct
  source 1..41: mol_type = other RNA
tgtgctcttgctggggctggtgctccgggggtctcactact

SEQ ID NO: 85 - RNA, 41 nt, synthetic construct
  source 1..41: mol_type = other RNA
ggctggtggttaaggggtcttactccttggcggccatgtgg

SEQ ID NO: 86 - RNA, 41 nt, synthetic construct
  source 1..41: mol_type = other RNA
tgtgctcttgctggggctggtggtcacggggtctcactcct

SEQ ID NO: 87 - RNA, 41 nt, synthetic construct
  source 1..41: mol_type = other RNA
tgtgctcttgctggggctggttacccaggggcttcacttct

SEQ ID NO: 88 - RNA, 41 nt, synthetic construct
  source 1..41: mol_type = other RNA
tgtgctcttgctggggctggtggtccatgggtgtcactcca

SEQ ID NO: 89 - RNA, 41 nt, synthetic construct
  source 1..41: mol_type = other RNA
tgtgctcttgctggggctggtggtccagggtactcactcct

SEQ ID NO: 90 - RNA, 41 nt, synthetic construct
  source 1..41: mol_type = other RNA
ggctggtggttcaggggttccactccttggaggccatgtgg

SEQ ID NO: 91 - RNA, 41 nt, synthetic construct
  source 1..41: mol_type = other RNA
ggctggtggtccagggtactcactccttggaggccatgtgg

SEQ ID NO: 92 - RNA, 41 nt, synthetic construct
  source 1..41: mol_type = other RNA
ggctggtggtccaggggtcccacttattgggggccatgtgg

SEQ ID NO: 93 - RNA, 42 nt, synthetic construct
  source 1..42: mol_type = other RNA
tgtgctcttgctggggctggtgttccaggggtctcacctcct

SEQ ID NO: 94 - RNA, 41 nt, synthetic construct
  source 1..41: mol_type = other RNA
tgtgctcttgctggggctggtggtgcaggggtctcactcct

SEQ ID NO: 95 - RNA, 41 nt, synthetic construct
  source 1..41: mol_type = other RNA
tgtgctcttgctggggctggtggtcaaggggtctcactcct

SEQ ID NO: 96 - RNA, 42 nt, synthetic construct
  source 1..42: mol_type = other RNA
ggctggtggtccagagggtctcactaattggcggccatgtgg

SEQ ID NO: 97 - RNA, 36 nt, synthetic construct
  source 1..36: mol_type = other RNA
tgtgctcttgctggggctggtgggggtctcactcct

SEQ ID NO: 98 - RNA, 41 nt, synthetic construct
  source 1..41: mol_type = other RNA
tgtgctcttgctggggctggtgatccaggagtctcaatcct

SEQ ID NO: 99 - RNA, 36 nt, synthetic construct
  source 1..36: mol_type = other RNA
tgtgctcttgctggggctggtgggggtcttactcct

SEQ ID NO: 100 - RNA, 41 nt, synthetic construct
  source 1..41: mol_type = other RNA
tgtgctcttgctggggctggtggtccctgggccttactcgt

SEQ ID NO: 101 - RNA, 41 nt, synthetic construct
  source 1..41: mol_type = other RNA
ggctggtggtccaggggccttactcctcggaggccatgtgg

SEQ ID NO: 102 - RNA, 41 nt, synthetic construct
  source 1..41: mol_type = other RNA
ggctggtggtccaggggtttcactacttggaggccatgtgg

SEQ ID NO: 103 - RNA, 41 nt, synthetic construct
  source 1..41: mol_type = other RNA
tgtgctcttgctggggctggtggtccagggacctcactcct

SEQ ID NO: 104 - RNA, 41 nt, synthetic construct
  source 1..41: mol_type = other RNA
ggctggtggtccaggggtctcacctctcggaggccatgtgg

SEQ ID NO: 105 - RNA, 41 nt, synthetic construct
  source 1..41: mol_type = other RNA
ggctggtggtccaggggtcttactccttgaaggccatgtgg

SEQ ID NO: 106 - RNA, 41 nt, synthetic construct
  source 1..41: mol_type = other RNA
tgtgctcttgctggggctggtggtctaagggcctcactcct

SEQ ID NO: 107 - RNA, 41 nt, synthetic construct
  source 1..41: mol_type = other RNA
tgtgctcttgctggggctggtggactaggggtctcactcct

SEQ ID NO: 108 - RNA, 41 nt, synthetic construct
  source 1..41: mol_type = other RNA
ggctggtggtccagggtacttactccttggaggccatgtgg

SEQ ID NO: 109 - RNA, 41 nt, synthetic construct
  source 1..41: mol_type = other RNA
tgtgctcttgctggggctggtggtccaaggggctcactcct

SEQ ID NO: 110 - RNA, 41 nt, synthetic construct
  source 1..41: mol_type = other RNA
tgtgctcttgctggggctggtggtccagaggtcttactcct

SEQ ID NO: 111 - RNA, 41 nt, synthetic construct
  source 1..41: mol_type = other RNA
tgtgctcttgctggggctggtggaccaggggtctcactccc

SEQ ID NO: 112 - RNA, 41 nt, synthetic construct
  source 1..41: mol_type = other RNA
tgtgctcttgctggggctgggggtccaggggtctcactccc

SEQ ID NO: 113 - RNA, 41 nt, synthetic construct
  source 1..41: mol_type = other RNA
ggctggtggtccaggagtctcacttcttggaggccatgtgg

SEQ ID NO: 114 - RNA, 41 nt, synthetic construct
  source 1..41: mol_type = other RNA
tgtgctcttgctggggctggtggtccaggggcctcactcct

SEQ ID NO: 115 - RNA, 41 nt, synthetic construct
  source 1..41: mol_type = other RNA
ggctggtggtccatgggtgtcactccatggaggccatgtgg

SEQ ID NO: 116 - RNA, 41 nt, synthetic construct
  source 1..41: mol_type = other RNA
ggctggtggttcagggttcttactcacccgaggccatgtgg

SEQ ID NO: 117 - RNA, 41 nt, synthetic construct
  source 1..41: mol_type = other RNA
ggctggtggtccaggagtctcactctttggaggccatgtgg

SEQ ID NO: 118 - RNA, 41 nt, synthetic construct
  source 1..41: mol_type = other RNA
tgtgctcttgctggggctggcggcccaggggtcttacccct

SEQ ID NO: 119 - RNA, 40 nt, synthetic construct
  source 1..40: mol_type = other RNA
tgtgctcttgctggggctggtggtccaggggtcttactct

SEQ ID NO: 120 - RNA, 41 nt, synthetic construct
  source 1..41: mol_type = other RNA
tgtgctcttgctggggctgggggtccaggggtcccactcct

SEQ ID NO: 121 - RNA, 41 nt, synthetic construct
  source 1..41: mol_type = other RNA
tgtgctcttgctggggctggtggtccaagggtcttactcat

SEQ ID NO: 122 - RNA, 41 nt, synthetic construct
  source 1..41: mol_type = other RNA
tgtgctcttgctggggctggtggtccaagggtcccactcct

SEQ ID NO: 123 - RNA, 41 nt, synthetic construct
  source 1..41: mol_type = other RNA
tgtgctcttgctggggctggtgatccaggggtctcactcct

SEQ ID NO: 124 - RNA, 41 nt, synthetic construct
  source 1..41: mol_type = other RNA
ggctggtggttcaggggcctcactccttggtggccatgtgg

SEQ ID NO: 125 - RNA, 41 nt, synthetic construct
  source 1..41: mol_type = other RNA
ggctggtggtccagggatctcactccttggaggccatgtgg

SEQ ID NO: 126 - RNA, 41 nt, synthetic construct
  source 1..41: mol_type = other RNA
tgtgctcttgctggggctggtggtacaggggtctcacttct

SEQ ID NO: 127 - RNA, 41 nt, synthetic construct
  source 1..41: mol_type = other RNA
ggctggtggtccaggggtctcactggttggaggccatgtgg

SEQ ID NO: 128 - RNA, 41 nt, synthetic construct
  source 1..41: mol_type = other RNA
tgtgctcttgctggggctggtggtccgttggcccaactcct

SEQ ID NO: 129 - RNA, 41 nt, synthetic construct
  source 1..41: mol_type = other RNA
tgtgctcttgctggggctggcagttcaggggtctcactcct

SEQ ID NO: 130 - RNA, 41 nt, synthetic construct
  source 1..41: mol_type = other RNA
tgtgctcttgctggggctggtggtccaggggtcttactcca

SEQ ID NO: 131 - RNA, 41 nt, synthetic construct
  source 1..41: mol_type = other RNA
ggctggtggttcaggggtcttactttctggaggccatgtgg

SEQ ID NO: 132 - RNA, 41 nt, synthetic construct
  source 1..41: mol_type = other RNA
tgtgctcttgctggggctggtggtccaggagtctcactcat

SEQ ID NO: 133 - RNA, 41 nt, synthetic construct
  source 1..41: mol_type = other RNA
ggctggtggtccaggggcctcactccttggaggccatgtgg

SEQ ID NO: 134 - RNA, 41 nt, synthetic construct
  source 1..41: mol_type = other RNA
ggctggtggtccaggggtcccactccttggcggccatgtgg

SEQ ID NO: 135 - RNA, 41 nt, synthetic construct
  source 1..41: mol_type = other RNA
tgtgctcttgctggggctggtgtcacagcaatttcactctt

SEQ ID NO: 136 - RNA, 41 nt, synthetic construct
  source 1..41: mol_type = other RNA
tgtgctcttgctggggctggtggtccaagggtctcactcat

SEQ ID NO: 137 - RNA, 41 nt, synthetic construct
  source 1..41: mol_type = other RNA
tgtgctcttgctggggctggtggtccagggtcctcactcct

SEQ ID NO: 138 - RNA, 41 nt, synthetic construct
  source 1..41: mol_type = other RNA
tgtgctcttgctggggctggtggtccaagggtctcactcct

SEQ ID NO: 139 - RNA, 41 nt, synthetic construct
  source 1..41: mol_type = other RNA
tgtgctcttgctggggctggtggtccacgggtctcactcct

SEQ ID NO: 140 - RNA, 41 nt, synthetic construct
  source 1..41: mol_type = other RNA
tgtgctcttgctggggctggtggtccagggttctcactcct

SEQ ID NO: 141 - RNA, 41 nt, synthetic construct
  source 1..41: mol_type = other RNA
tgtgctcttgctggggctggtggtccaggggccttactcct

SEQ ID NO: 142 - RNA, 41 nt, synthetic construct
  source 1..41: mol_type = other RNA
tgtgctcttgctggggctggtgatccaggggcctcactcct

SEQ ID NO: 143 - RNA, 40 nt, synthetic construct
  source 1..40: mol_type = other RNA
tgtgctcttgctggggctggtggtccagggtcacactcct

SEQ ID NO: 144 - RNA, 41 nt, synthetic construct
  source 1..41: mol_type = other RNA
ggctggtggtccaaggggctcacttcttggtggccatgtgg

SEQ ID NO: 145 - RNA, 41 nt, synthetic construct
  source 1..41: mol_type = other RNA
tgtgctcttgctggggctggtggtccagcggtctcactcct

SEQ ID NO: 146 - RNA, 41 nt, synthetic construct
  source 1..41: mol_type = other RNA
ggctggtggtccaggggtctcacttcttggaggccatgtgg

SEQ ID NO: 147 - RNA, 39 nt, synthetic construct
  source 1..39: mol_type = other RNA
ggctggtggtccagggtcctcacttctgaggccatgtgg

SEQ ID NO: 148 - RNA, 41 nt, synthetic construct
  source 1..41: mol_type = other RNA
ggctggtggtttaagggcctcactccttgaaggccatgtgg

SEQ ID NO: 149 - RNA, 41 nt, synthetic construct
  source 1..41: mol_type = other RNA
ggctggtggtcctagggtcttactccttggaggccatgtgg

SEQ ID NO: 150 - RNA, 41 nt, synthetic construct
  source 1..41: mol_type = other RNA
tgtgctcttgctggggctggtggtccagggctctcactcct

SEQ ID NO: 151 - RNA, 42 nt, synthetic construct
  source 1..42: mol_type = other RNA
tgtgctcttgctggggctggtgttccaggggtcttacctcct

SEQ ID NO: 152 - RNA, 41 nt, synthetic construct
  source 1..41: mol_type = other RNA
ggctggtggtctaggggtctcactccttggtggccatgtgg

SEQ ID NO: 153 - RNA, 41 nt, synthetic construct
  source 1..41: mol_type = other RNA
tgtgctcttgctggggctggtggtcctagggtctcactcct

SEQ ID NO: 154 - RNA, 42 nt, synthetic construct
  source 1..42: mol_type = other RNA
ggctggtggtccaaggatctcactcccctcgaggccatgtgg

SEQ ID NO: 155 - RNA, 41 nt, synthetic construct
  source 1..41: mol_type = other RNA
tgtgctcttgctggggctggtggtccaggggtcttactcat

SEQ ID NO: 156 - RNA, 41 nt, synthetic construct
  source 1..41: mol_type = other RNA
ggctggtggtttaggggtctcactccttggaggccatgtgg

SEQ ID NO: 157 - RNA, 41 nt, synthetic construct
  source 1..41: mol_type = other RNA
tgtgctcttgctggggctggtggtccaggggtcttactggt

SEQ ID NO: 158 - RNA, 41 nt, synthetic construct
  source 1..41: mol_type = other RNA
tgtgctcttgctggggctggtggtccagggtacttactcct

SEQ ID NO: 159 - RNA, 41 nt, synthetic construct
  source 1..41: mol_type = other RNA
ggctggtggtccaggggtctcactcagtggaggccatgtgg

SEQ ID NO: 160 - RNA, 41 nt, synthetic construct
  source 1..41: mol_type = other RNA
ggctggtggtccaagggcctcactaattggcggccatgtgg

SEQ ID NO: 161 - RNA, 41 nt, synthetic construct
  source 1..41: mol_type = other RNA
tgtgctcttgctggggctggtgtgccaggggtctcaatcct

SEQ ID NO: 162 - RNA, 41 nt, synthetic construct
  source 1..41: mol_type = other RNA
ggctggtggtccaggggtctcactcattgggggccatgtgg

SEQ ID NO: 163 - RNA, 41 nt, synthetic construct
  source 1..41: mol_type = other RNA
ggctggtggtccaggggtcccactccttaccggccatgtgg

SEQ ID NO: 164 - RNA, 41 nt, synthetic construct
  source 1..41: mol_type = other RNA
tgtgctcttgctggggctggtggtcaaggggtcttactcct

SEQ ID NO: 165 - RNA, 40 nt, synthetic construct
  source 1..40: mol_type = other RNA
ggctggtggttcagggttttactccttggaggccatgtgg

SEQ ID NO: 166 - RNA, 41 nt, synthetic construct
  source 1..41: mol_type = other RNA
tgtgctcttgctggggctggtggtccaggggtctcactccg

SEQ ID NO: 167 - RNA, 42 nt, synthetic construct
  source 1..42: mol_type = other RNA
tgtgctcttgctggggctggtggtccagagggtctcactaat

SEQ ID NO: 168 - RNA, 41 nt, synthetic construct
  source 1..41: mol_type = other RNA
ggctggtggtccaggggtctcactctttggaggccatgtgg

SEQ ID NO: 169 - RNA, 41 nt, synthetic construct
  source 1..41: mol_type = other RNA
tgtgctcttgctggggctggtggtccaggggtctcactcat

SEQ ID NO: 170 - RNA, 41 nt, synthetic construct
  source 1..41: mol_type = other RNA
tgtgctcttgctggggctggtggtccatgggtgttactcca

SEQ ID NO: 171 - RNA, 41 nt, synthetic construct
  source 1..41: mol_type = other RNA
ggctggtggttaaggaatctcactccttggcggccatgtgg

SEQ ID NO: 172 - RNA, 41 nt, synthetic construct
  source 1..41: mol_type = other RNA
ggctggtggtcaaggggtcttactccttggaggccatgtgg

SEQ ID NO: 173 - RNA, 41 nt, synthetic construct
  source 1..41: mol_type = other RNA
ggctggtggtccaaggggctcacttcttggcggccatgtgg

SEQ ID NO: 174 - RNA, 42 nt, synthetic construct
  source 1..42: mol_type = other RNA
tgtgctcttgctggggctggaggtcccggaggtcttactcct

SEQ ID NO: 175 - RNA, 41 nt, synthetic construct
  source 1..41: mol_type = other RNA
ggctggtggtccggggtactcactaattggaggccatgtgg

SEQ ID NO: 176 - RNA, 41 nt, synthetic construct
  source 1..41: mol_type = other RNA
ggctggtggtccaggagtctcactccttggaggccatgtgg

SEQ ID NO: 177 - RNA, 41 nt, synthetic construct
  source 1..41: mol_type = other RNA
tgtgctcttgctggggctgggggtccaggggtcctactcct

SEQ ID NO: 178 - RNA, 41 nt, synthetic construct
  source 1..41: mol_type = other RNA
ggctggtggtccgggggtcccactccttggcggccatgtgg

SEQ ID NO: 179 - RNA, 41 nt, synthetic construct
  source 1..41: mol_type = other RNA
tgtgctcttgctggggctggtggtccagcggtctcactacc

SEQ ID NO: 180 - RNA, 41 nt, synthetic construct
  source 1..41: mol_type = other RNA
ggctggtggtgcagggtccccactacttggaggccatgtgg

SEQ ID NO: 181 - RNA, 41 nt, synthetic construct
  source 1..41: mol_type = other RNA
ggctggtggtgcaggggtttcactttttggaggccatgtgg

SEQ ID NO: 182 - RNA, 41 nt, synthetic construct
  source 1..41: mol_type = other RNA
tgtgctcttgctggggctggtggtccaggggtcccactcat

SEQ ID NO: 183 - RNA, 41 nt, synthetic construct
  source 1..41: mol_type = other RNA
tgtgctcttgctggggctggtggtccagcggtcttactacc

SEQ ID NO: 184 - RNA, 41 nt, synthetic construct
  source 1..41: mol_type = other RNA
ggctggtggtctaggggtctcactacttggtggccatgtgg

SEQ ID NO: 185 - RNA, 41 nt, synthetic construct
  source 1..41: mol_type = other RNA
tgtgctcttgctggggctggtggtccaggggtctcactcca

SEQ ID NO: 186 - RNA, 41 nt, synthetic construct
  source 1..41: mol_type = other RNA
ggctggtggtccagggatctcactcctttgaggccatgtgg

SEQ ID NO: 187 - RNA, 41 nt, synthetic construct
  source 1..41: mol_type = other RNA
tgtgctcttgctggggctggtggtccagtggtctcactcct

SEQ ID NO: 188 - RNA, 41 nt, synthetic construct
  source 1..41: mol_type = other RNA
ggctggtggtacaggggtttcactttttggaggccatgtgg

SEQ ID NO: 189 - RNA, 42 nt, synthetic construct
  source 1..42: mol_type = other RNA
tgtgctcttgctggggctggtggtccaggggtcttacctcct

SEQ ID NO: 190 - RNA, 41 nt, synthetic construct
  source 1..41: mol_type = other RNA
tgtgctcttgctggggctggtggtcctagggtcttactcct

SEQ ID NO: 191 - RNA, 41 nt, synthetic construct
  source 1..41: mol_type = other RNA
ggctggtggtccaggggtcttactcttctcaggccatgtgg

SEQ ID NO: 192 - RNA, 39 nt, synthetic construct
  source 1..39: mol_type = other RNA
ggctggtggtcccggaggtctcactccttggccatgtgg

SEQ ID NO: 193 - RNA, 41 nt, synthetic construct
  source 1..41: mol_type = other RNA
tgtgctcttgctggggctggtggtccatgggtaccactcct

SEQ ID NO: 194 - RNA, 41 nt, synthetic construct
  source 1..41: mol_type = other RNA
tgtgctcttgctggggctggtggtccagggttctcactcac

SEQ ID NO: 195 - RNA, 41 nt, synthetic construct
  source 1..41: mol_type = other RNA
ggctggtggtccaggggtctcaatccttggaggccatgtgg

SEQ ID NO: 196 - RNA, 41 nt, synthetic construct
  source 1..41: mol_type = other RNA
ggctggtggtccaggagtctcaatccttggaggccatgtgg

SEQ ID NO: 197 - RNA, 41 nt, synthetic construct
  source 1..41: mol_type = other RNA
ggctggtggtacaggaacctcactcctttggggccatgtgg

SEQ ID NO: 198 - RNA, 41 nt, synthetic construct
  source 1..41: mol_type = other RNA
ggctggtggtccaggggtcttactggttggaggccatgtgg

SEQ ID NO: 199 - RNA, 43 nt, synthetic construct
  source 1..43: mol_type = other RNA
ggctggtggtctgggggtctcactggttttggaggccatgtgg

SEQ ID NO: 200 - RNA, 41 nt, synthetic construct
  source 1..41: mol_type = other RNA
ggctggtggtcccgggatctcactccttggaggccatgtgg

SEQ ID NO: 201 - RNA, 41 nt, synthetic construct
  source 1..41: mol_type = other RNA
ggctggtggtccagaaggttccactctttgaggccatgtgg

SEQ ID NO: 202 - RNA, 41 nt, synthetic construct
  source 1..41: mol_type = other RNA
tgtgctcttgctggggctggtggtccaagggtcttactcct

SEQ ID NO: 203 - RNA, 41 nt, synthetic construct
  source 1..41: mol_type = other RNA
ggctggtggtcaaggggtctcactccttggaggccatgtgg

SEQ ID NO: 204 - RNA, 42 nt, synthetic construct
  source 1..42: mol_type = other RNA
ggctggtggtccaggggtcttacctccttggaggccatgtgg

SEQ ID NO: 205 - RNA, 41 nt, synthetic construct
  source 1..41: mol_type = other RNA
ggctggtggtacagggatctcactccttagaggccatgtgg

SEQ ID NO: 206 - RNA, 41 nt, synthetic construct
  source 1..41: mol_type = other RNA
ggctggtggtccaagggtcttactccttgtaggccatgtgg

SEQ ID NO: 207 - RNA, 41 nt, synthetic construct
  source 1..41: mol_type = other RNA
tgtgctcttgctggggctggtggtcctcgggtctcactcct

SEQ ID NO: 208 - RNA, 42 nt, synthetic construct
  source 1..42: mol_type = other RNA
ggctggtggtccaaggggtctcactcgtccccggccatgtgg

SEQ ID NO: 209 - RNA, 41 nt, synthetic construct
  source 1..41: mol_type = other RNA
ggctggtggtccaagggtcccacttcttgggggccatgtgg

SEQ ID NO: 210 - RNA, 41 nt, synthetic construct
  source 1..41: mol_type = other RNA
ggctggtggtcaaggggcctcactcttacaaggccatgtgg

SEQ ID NO: 211 - RNA, 41 nt, synthetic construct
  source 1..41: mol_type = other RNA
ggctggtggtgcaggagtctcactccttggaggccatgtgg

SEQ ID NO: 212 - RNA, 41 nt, synthetic construct
  source 1..41: mol_type = other RNA
ggctggtggtttaggggtcttactccttggaggccatgtgg

SEQ ID NO: 213 - RNA, 42 nt, synthetic construct
  source 1..42: mol_type = other RNA
tgtgctcttgctggggctggtggtccagggggtctcactaat

SEQ ID NO: 214 - RNA, 45 nt, synthetic construct
  source 1..45: mol_type = other RNA
ggctggtggtccagggatctcactcctgaaaaggaggccatgtgg

SEQ ID NO: 215 - RNA, 41 nt, synthetic construct
  source 1..41: mol_type = other RNA
ggctggtggtccagcggtctcactccttggaggccatgtgg

SEQ ID NO: 216 - RNA, 41 nt, synthetic construct
  source 1..41: mol_type = other RNA
ggctggtggtccagggctctcactccttggaggccatgtgg

SEQ ID NO: 217 - RNA, 41 nt, synthetic construct
  source 1..41: mol_type = other RNA
ggctggtggtacagggatctcactccttggaggccatgtgg

SEQ ID NO: 218 - RNA, 41 nt, synthetic construct
  source 1..41: mol_type = other RNA
tgtgctcttgctggggctggtggtccaggggtctcactccc

SEQ ID NO: 219 - RNA, 41 nt, synthetic construct
  source 1..41: mol_type = other RNA
tgtgctcttgctggggctggtggtccaagggcctcactaat

SEQ ID NO: 220 - RNA, 41 nt, synthetic construct
  source 1..41: mol_type = other RNA
ggctggtggtctagcggtatcactacttggaggccatgtgg

SEQ ID NO: 221 - RNA, 39 nt, synthetic construct
  source 1..39: mol_type = other RNA
ggctggtggtccacgggtcttacttcttaggccatgtgg

SEQ ID NO: 222 - RNA, 41 nt, synthetic construct
  source 1..41: mol_type = other RNA
tgtgctcttgctggggctggtggtccaggggtctcactggt

SEQ ID NO: 223 - RNA, 41 nt, synthetic construct
  source 1..41: mol_type = other RNA
ggctggtggtgcaggggtctcactccttgcaggccatgtgg

SEQ ID NO: 224 - RNA, 41 nt, synthetic construct
  source 1..41: mol_type = other RNA
tgtgctcttgctggggctggtggtccaggggtcccattcct

SEQ ID NO: 225 - RNA, 41 nt, synthetic construct
  source 1..41: mol_type = other RNA
tgtgctcttgctggggctggtggtccaaggggcttactcct

SEQ ID NO: 226 - RNA, 41 nt, synthetic construct
  source 1..41: mol_type = other RNA
tgtgctcttgctggggctggtggtccaggggtcttactccc

SEQ ID NO: 227 - RNA, 42 nt, synthetic construct
  source 1..42: mol_type = other RNA
tgtgctcttgctggggctggtggtccaggggtcttacctaac

SEQ ID NO: 228 - RNA, 41 nt, synthetic construct
  source 1..41: mol_type = other RNA
ggctggtggtccatgggtctcactccgtggaggccatgtgg

SEQ ID NO: 229 - RNA, 42 nt, synthetic construct
  source 1..42: mol_type = other RNA
tgtgctcttgctggggctggtggtccaggggtcaccacttct

SEQ ID NO: 230 - RNA, 41 nt, synthetic construct
  source 1..41: mol_type = other RNA
ggctggtggtccaggggtctcactcattggaggccatgtgg

SEQ ID NO: 231 - RNA, 42 nt, synthetic construct
  source 1..42: mol_type = other RNA
ggctggtggtccaggggtctcacctaactggaggccatgtgg

SEQ ID NO: 232 - RNA, 41 nt, synthetic construct
  source 1..41: mol_type = other RNA
ggctggtggtccaggggtctcactccatggaggccatgtgg

SEQ ID NO: 233 - RNA, 42 nt, synthetic construct
  source 1..42: mol_type = other RNA
ggctggtggtccaaggggtcttactcgtccccggccatgtgg

SEQ ID NO: 234 - RNA, 44 nt, synthetic construct
  source 1..44: mol_type = other RNA
ggctggtggtggggggtttcactatacccttggaggccatgtgg

SEQ ID NO: 235 - RNA, 40 nt, synthetic construct
  source 1..40: mol_type = other RNA
tgtgctcttgctggggctggtggttcaggggttcactcct

SEQ ID NO: 236 - RNA, 41 nt, synthetic construct
  source 1..41: mol_type = other RNA
ggctggtggtccaggggtcctactccttaccggccatgtgg

SEQ ID NO: 237 - RNA, 42 nt, synthetic construct
  source 1..42: mol_type = other RNA
ggctggtggtccaggggtcatcactttttaaaggccatgtgg

SEQ ID NO: 238 - RNA, 41 nt, synthetic construct
  source 1..41: mol_type = other RNA
ggctggtggtctaggggtctcactccttggaggccatgtgg

SEQ ID NO: 239 - RNA, 41 nt, synthetic construct
  source 1..41: mol_type = other RNA
ggctggtggtccaggggtctcactccgtggaggccatgtgg

SEQ ID NO: 240 - RNA, 40 nt, synthetic construct
  source 1..40: mol_type = other RNA
ggctggtggttcaggggtctcactccttggggccatgtgg

SEQ ID NO: 241 - RNA, 41 nt, synthetic construct
  source 1..41: mol_type = other RNA
tgtgctcttgctggggctggtggtccaggggtcttactcag

SEQ ID NO: 242 - RNA, 43 nt, synthetic construct
  source 1..43: mol_type = other RNA
ggctggtggtctgggggtcttacagtccttggaggccatgtgg

SEQ ID NO: 243 - RNA, 41 nt, synthetic construct
  source 1..41: mol_type = other RNA
ggctggtggtccaggggtcccactccttggaggccatgtgg

SEQ ID NO: 244 - RNA, 40 nt, synthetic construct
  source 1..40: mol_type = other RNA
tgtgctcttgctggggctggtggtccaggggtctcactct

SEQ ID NO: 245 - RNA, 41 nt, synthetic construct
  source 1..41: mol_type = other RNA
ggctggtggtccaggggtctcactccttgaaggccatgtgg

SEQ ID NO: 246 - RNA, 41 nt, synthetic construct
  source 1..41: mol_type = other RNA
ggctggtggtccaggggtcttactcattgggggccatgtgg

SEQ ID NO: 247 - RNA, 41 nt, synthetic construct
  source 1..41: mol_type = other RNA
gggtctcattccttgggggccatgtgggccatgaggtccac

SEQ ID NO: 248 - RNA, 41 nt, synthetic construct
  source 1..41: mol_type = other RNA
tgtgctcttgctggggctggtggtccaggggtcctattcct

SEQ ID NO: 249 - RNA, 39 nt, synthetic construct
  source 1..39: mol_type = other RNA
ggctggtggttcaggggtctcactccttaggccatgtgg

SEQ ID NO: 250 - RNA, 47 nt, synthetic construct
  source 1..47: mol_type = other RNA
ggctggtggtccagcagtctcactcctacctcctggaggccatgtgg

SEQ ID NO: 251 - RNA, 41 nt, synthetic construct
  source 1..41: mol_type = other RNA
ggctggtggtccaggggtctcactcctcggaggccatgtgg

SEQ ID NO: 252 - RNA, 41 nt, synthetic construct
  source 1..41: mol_type = other RNA
tgtgctcttgctggggctggtggtccagggaccttactcct

SEQ ID NO: 253 - RNA, 39 nt, synthetic construct
  source 1..39: mol_type = other RNA
tgtgctcttgctggggctggtggtcacggggtctcacag

SEQ ID NO: 254 - RNA, 41 nt, synthetic construct
  source 1..41: mol_type = other RNA
ggctggtggtccaaggatgtcactccttggaggccatgtgg

SEQ ID NO: 255 - RNA, 41 nt, synthetic construct
  source 1..41: mol_type = other RNA
tgtgctcttgctggggctggtggtccaggggtctcactcag

SEQ ID NO: 256 - RNA, 41 nt, synthetic construct
  source 1..41: mol_type = other RNA
tgtgctcttgctggggctggtggtccagggctcttgctcct

SEQ ID NO: 257 - RNA, 40 nt, synthetic construct
  source 1..40: mol_type = other RNA
ggctggtggtccaggggtctcacttttggcggccatgtgg

SEQ ID NO: 258 - RNA, 43 nt, synthetic construct
  source 1..43: mol_type = other RNA
tgtgctcttgctggggctggtggtctggaggtctcacagtcct

SEQ ID NO: 259 - RNA, 41 nt, synthetic construct
  source 1..41: mol_type = other RNA
ggctggtggtacaggagtctcactccttggaggccatgtgg

SEQ ID NO: 260 - RNA, 41 nt, synthetic construct
  source 1..41: mol_type = other RNA
tgtgctcttgctggggctggtggtctaggggtctcgctcct

SEQ ID NO: 261 - RNA, 41 nt, synthetic construct
  source 1..41: mol_type = other RNA
ggctggtggtccaaggggcttacttcttggtggccatgtgg

SEQ ID NO: 262 - RNA, 41 nt, synthetic construct
  source 1..41: mol_type = other RNA
tgtgctcttgctggggctggtggtccagggttcttactcac

SEQ ID NO: 263 - RNA, 42 nt, synthetic construct
  source 1..42: mol_type = other RNA
tgtgctcttgctggggctggtggtccagagggtcttactaat

SEQ ID NO: 264 - RNA, 41 nt, synthetic construct
  source 1..41: mol_type = other RNA
ggctggtggtccaggggtcttactcctcggaggccatgtgg

SEQ ID NO: 265 - RNA, 41 nt, synthetic construct
  source 1..41: mol_type = other RNA
tgtgctcttgctggggctggtgggctagcggtatcactact

SEQ ID NO: 266 - RNA, 41 nt, synthetic construct
  source 1..41: mol_type = other RNA
ggctggtggtccaggggtcttactccatggaggccatgtgg

SEQ ID NO: 267 - RNA, 42 nt, synthetic construct
  source 1..42: mol_type = other RNA
tgtgctcttgctggggctggtggtccacgggtctccactcct

SEQ ID NO: 268 - RNA, 41 nt, synthetic construct
  source 1..41: mol_type = other RNA
tgtgctcttgctggggctggtggtccagggtccttactcct

SEQ ID NO: 269 - RNA, 41 nt, synthetic construct
  source 1..41: mol_type = other RNA
ggctggtggtccaggggtctcactccttagaggccatgtgg

SEQ ID NO: 270 - RNA, 41 nt, synthetic construct
  source 1..41: mol_type = other RNA
tgtgctcttgctggggctggtggtccaggggtctcattccc

SEQ ID NO: 271 - RNA, 43 nt, synthetic construct
  source 1..43: mol_type = other RNA
ggctggtggtctggaggtctcacagtccttggaggccatgtgg

SEQ ID NO: 272 - RNA, 41 nt, synthetic construct
  source 1..41: mol_type = other RNA
tgtgctcttgctggggctggtggtccaggagtcttactcct

SEQ ID NO: 273 - RNA, 42 nt, synthetic construct
  source 1..42: mol_type = other RNA
ggctggtggtccaggggtctcactcctctggaggccatgtgg

SEQ ID NO: 274 - RNA, 41 nt, synthetic construct
  source 1..41: mol_type = other RNA
tgtgctcttgctggggctggtggtccaggggtctcacgcct

SEQ ID NO: 275 - RNA, 41 nt, synthetic construct
  source 1..41: mol_type = other RNA
tgtgctcttgctggggctggtcgtctaggggtctcactcct

SEQ ID NO: 276 - RNA, 41 nt, synthetic construct
  source 1..41: mol_type = other RNA
tgtgctcttgctggggctggtggtctaagggtcttattcct

SEQ ID NO: 277 - RNA, 41 nt, synthetic construct
  source 1..41: mol_type = other RNA
ggctggtggtccaggggtcttactccttggaggccatgtgg

SEQ ID NO: 278 - RNA, 41 nt, synthetic construct
  source 1..41: mol_type = other RNA
tgtgctcttgctggggctggtggtctcggggtctctctcct

SEQ ID NO: 279 - RNA, 41 nt, synthetic construct
  source 1..41: mol_type = other RNA
tgtgctcttgctggggctggtggtccaggggtcttactcct

SEQ ID NO: 280 - RNA, 42 nt, synthetic construct
  source 1..42: mol_type = other RNA
tgtgctcttgctggggctggtggtccaggggtcatcacttct

SEQ ID NO: 281 - RNA, 39 nt, synthetic construct
  source 1..39: mol_type = other RNA
ggctggtggtccacgggtctcacttcttaggccatgtgg

SEQ ID NO: 282 - RNA, 40 nt, synthetic construct
  source 1..40: mol_type = other RNA
ggctggtggttcagggtttcactccttggaggccatgtgg

SEQ ID NO: 283 - RNA, 41 nt, synthetic construct
  source 1..41: mol_type = other RNA
tgtgctcttgctggggctggtggtccaggggtaccactctt

SEQ ID NO: 284 - RNA, 41 nt, synthetic construct
  source 1..41: mol_type = other RNA
ggctggtggtccaagggtctcactccttggaggccatgtgg

SEQ ID NO: 285 - RNA, 41 nt, synthetic construct
  source 1..41: mol_type = other RNA
tgtgctcttgctggggctggtggtccaggggtctcactcct

SEQ ID NO: 286 - RNA, 41 nt, synthetic construct
  source 1..41: mol_type = other RNA
ggctggtggtccaagggtctcactcattggaggccatgtgg

SEQ ID NO: 287 - RNA, 41 nt, synthetic construct
  source 1..41: mol_type = other RNA
ggctggtggtttaagggccttactccttgaaggccatgtgg

SEQ ID NO: 288 - RNA, 41 nt, synthetic construct
  source 1..41: mol_type = other RNA
tgtgctcttgctggggctggtaatccaggggtctcactcct

SEQ ID NO: 289 - RNA, 42 nt, synthetic construct
  source 1..42: mol_type = other RNA
ggctggtggtccctgggcctcactcgttggtgggccatgtgg

SEQ ID NO: 290 - RNA, 41 nt, synthetic construct
  source 1..41: mol_type = other RNA
tgtgctcttgctggggctggtggtccatgggtcttactccg

SEQ ID NO: 291 - RNA, 42 nt, synthetic construct
  source 1..42: mol_type = other RNA
gggtcttacctccttggaggccatgtgggccatgaggtccac

SEQ ID NO: 292 - RNA, 41 nt, synthetic construct
  source 1..41: mol_type = other RNA
ggctggtggtcacggggtctcactccttggaggccatgtgg

SEQ ID NO: 293 - RNA, 43 nt, synthetic construct
  source 1..43: mol_type = other RNA
tgtgctcttgctggggctggtggtctggaggtcttacagtcct

SEQ ID NO: 294 - RNA, 42 nt, synthetic construct
  source 1..42: mol_type = other RNA
ggctggtggtccaggggtctcacctccttggaggccatgtgg

SEQ ID NO: 295 - RNA, 43 nt, synthetic construct
  source 1..43: mol_type = other RNA
ggctggtggtctgggggtcttactggttttggaggccatgtgg

SEQ ID NO: 296 - RNA, 41 nt, synthetic construct
  source 1..41: mol_type = other RNA
ggctggtggtccaggggcctcactcctcggaggccatgtgg

SEQ ID NO: 297 - RNA, 41 nt, synthetic construct
  source 1..41: mol_type = other RNA
ggctggtggtacaggggtctcactttttggaggccatgtgg

SEQ ID NO: 298 - RNA, 41 nt, synthetic construct
  source 1..41: mol_type = other RNA
ggctggtggtcccggggtcttactccttaccggccatgtgg

SEQ ID NO: 299 - RNA, 41 nt, synthetic construct
  source 1..41: mol_type = other RNA
ggctggtggtccaggggtcttactcagtggaggccatgtgg

SEQ ID NO: 300 - RNA, 44 nt, synthetic construct
  source 1..44: mol_type = other RNA
ggctggtggtccgtggctctcactccttcctcgaggccatgtgg

SEQ ID NO: 301 - RNA, 43 nt, synthetic construct
  source 1..43: mol_type = other RNA
tgtgctcttgctggggctggtggtctgggggtctcactggtct

SEQ ID NO: 302 - RNA, 41 nt, synthetic construct
  source 1..41: mol_type = other RNA
ggctggtggtccaggggtctcactccttaccggccatgtgg

SEQ ID NO: 303 - RNA, 41 nt, synthetic construct
  source 1..41: mol_type = other RNA
ggctggtggtccaggggtcttacttcttggaggccatgtgg

SEQ ID NO: 304 - RNA, 41 nt, synthetic construct
  source 1..41: mol_type = other RNA
ggctggtggttaaggggtctcactccttggaggccatgtgg

SEQ ID NO: 305 - RNA, 41 nt, synthetic construct
  source 1..41: mol_type = other RNA
ggctggtggtccaggggtcttacctctcggaggccatgtgg

SEQ ID NO: 306 - RNA, 41 nt, synthetic construct
  source 1..41: mol_type = other RNA
ggctggtggtttaagggtcttattccttggaggccatgtgg

SEQ ID NO: 307 - RNA, 41 nt, synthetic construct
  source 1..41: mol_type = other RNA
ggctggtggttcaggggtcttactctcctgaggccatgtgg

SEQ ID NO: 308 - RNA, 42 nt, synthetic construct
  source 1..42: mol_type = other RNA
tgtgctcttgctggggctggtggtccaggggtctcacctcct

SEQ ID NO: 309 - RNA, 41 nt, synthetic construct
  source 1..41: mol_type = other RNA
ggctggtggtccaggggtctcactccctggaggccatgtgg

SEQ ID NO: 310 - RNA, 41 nt, synthetic construct
  source 1..41: mol_type = other RNA
ggctggtggtccaggggtctcactccttggaggccatgtgg

SEQ ID NO: 311 - RNA, 41 nt, synthetic construct
  source 1..41: mol_type = other RNA
ggctggtggtccaaggggcttacttcttggcggccatgtgg

SEQ ID NO: 312 - RNA, 41 nt, synthetic construct
  source 1..41: mol_type = other RNA
ggctggtggtccaggggtctcactcttctcaggccatgtgg

SEQ ID NO: 313 - RNA, 41 nt, synthetic construct
  source 1..41: mol_type = other RNA
ggctggtggtccaggggtcctactccttggaggccatgtgg

SEQ ID NO: 314 - RNA, 41 nt, synthetic construct
  source 1..41: mol_type = other RNA
ggctggtggtccacgggtctcactcctttgaggccatgtgg

SEQ ID NO: 315 - RNA, 41 nt, synthetic construct
  source 1..41: mol_type = other RNA
ggctggtggtccatgggtgttactccatggaggccatgtgg

SEQ ID NO: 316 - RNA, 41 nt, synthetic construct
  source 1..41: mol_type = other RNA
ggctggtggtccaagggtctcactccttgtaggccatgtgg

SEQ ID NO: 317 - RNA, 41 nt, synthetic construct
  source 1..41: mol_type = other RNA
tgtgctcttgctggggctggtggtcccggggactcagtcct

SEQ ID NO: 318 - RNA, 41 nt, synthetic construct
  source 1..41: mol_type = other RNA
ggctggtggtcaaggggtctcactccttgcaggccatgtgg

SEQ ID NO: 319 - RNA, 42 nt, synthetic construct
  source 1..42: mol_type = other RNA
ggctggtggtcgagggggtctcactccttcgcggccatgtgg

SEQ ID NO: 320 - RNA, 41 nt, synthetic construct
  source 1..41: mol_type = other RNA
ggatcttactccttggaggccatgtgggccatgaggtccac

SEQ ID NO: 321 - RNA, 41 nt, synthetic construct
  source 1..41: mol_type = other RNA
gggccttactccttggaggccatgtgggccatgaggtccac

SEQ ID NO: 322 - RNA, 41 nt, synthetic construct
  source 1..41: mol_type = other RNA
ggctggtggtacaagggtcttactccctggaggccatgtgg

SEQ ID NO: 323 - RNA, 39 nt, synthetic construct
  source 1..39: mol_type = other RNA
ggctggtggtcccggaggtcttactccttggccatgtgg

SEQ ID NO: 324 - RNA, 41 nt, synthetic construct
  source 1..41: mol_type = other RNA
ggctggtggtccaggggtcccattccttgggggccatgtgg

SEQ ID NO: 325 - RNA, 41 nt, synthetic construct
  source 1..41: mol_type = other RNA
ggctggtggtccaggggtctcacgcctaggaggccatgtgg

SEQ ID NO: 326 - RNA, 41 nt, synthetic construct
  source 1..41: mol_type = other RNA
ggctggtggttaaggggtctcactccttggcggccatgtgg

SEQ ID NO: 327 - RNA, 42 nt, synthetic construct
  source 1..42: mol_type = other RNA
ggctggtggtccaaggatcttactcccctcgaggccatgtgg

SEQ ID NO: 328 - RNA, 41 nt, synthetic construct
  source 1..41: mol_type = other RNA
ggctggtggtccaggggtcctattccttgggggccatgtgg

SEQ ID NO: 329 - RNA, 41 nt, synthetic construct
  source 1..41: mol_type = other RNA
gggtctcactcctttggggccatgtgggccatgaggtccac

SEQ ID NO: 330 - RNA, 42 nt, synthetic construct
  source 1..42: mol_type = other RNA
ggatctcactcccctcgaggccatgtgggccatgaggtccac

SEQ ID NO: 331 - RNA, 42 nt, synthetic construct
  source 1..42: mol_type = other RNA
tgtgctcttgctggggctggtggtccaggggtctcacctaac

SEQ ID NO: 332 - RNA, 40 nt, synthetic construct
  source 1..40: mol_type = other RNA
tgtgctcttgctggggctggtggtccaggggtcccctgag

SEQ ID NO: 333 - RNA, 41 nt, synthetic construct
  source 1..41: mol_type = other RNA
tgtgctcttgctggggctggtggtccagggatctcagtccc

SEQ ID NO: 334 - RNA, 41 nt, synthetic construct
  source 1..41: mol_type = other RNA
ggctggtggttcaggggtctcactctcctgaggccatgtgg

SEQ ID NO: 335 - RNA, 44 nt, synthetic construct
  source 1..44: mol_type = other RNA
tgtgctcttgctggggctggtggtggggggtttaactataccct

SEQ ID NO: 336 - RNA, 41 nt, synthetic construct
  source 1..41: mol_type = other RNA
ggctggtggtctaggggtcttgctccttggaggccatgtgg

SEQ ID NO: 337 - RNA, 41 nt, synthetic construct
  source 1..41: mol_type = other RNA
ggctggtggtagaggggtctcactcctttggggccatgtgg

SEQ ID NO: 338 - RNA, 41 nt, synthetic construct
  source 1..41: mol_type = other RNA
ggttcttactccttggaggccatgtgggccatgaggtccac

SEQ ID NO: 339 - RNA, 41 nt, synthetic construct
  source 1..41: mol_type = other RNA
ggctggtggttcaggggtctcactttctggaggccatgtgg

SEQ ID NO: 340 - RNA, 41 nt, synthetic construct
  source 1..41: mol_type = other RNA
tgtgctcttgctggggctggtggtccagggctctcgctcct

SEQ ID NO: 341 - RNA, 45 nt, synthetic construct
  source 1..45: mol_type = other RNA
ggctggtggtccaggggtctcacttctaacaaagaggccatgtgg

SEQ ID NO: 342 - RNA, 40 nt, synthetic construct
  source 1..40: mol_type = other RNA
ggctggtggtccgttggccccactcctcgaggccatgtgg

SEQ ID NO: 343 - RNA, 41 nt, synthetic construct
  source 1..41: mol_type = other RNA
ggctggtggtcccggggtctcactccttaccggccatgtgg

SEQ ID NO: 344 - RNA, 41 nt, synthetic construct
  source 1..41: mol_type = other RNA
gggtctcactctccagaggccatgtgggccatgaggtccac

SEQ ID NO: 345 - RNA, 41 nt, synthetic construct
  source 1..41: mol_type = other RNA
ggctggtggtcctagggtctcactccttggaggccatgtgg

SEQ ID NO: 346 - RNA, 39 nt, synthetic construct
  source 1..39: mol_type = other RNA
ggctggtggtcacggggtctcacagtggaggccatgtgg

SEQ ID NO: 347 - RNA, 41 nt, synthetic construct
  source 1..41: mol_type = other RNA
ggctggtggtcctcgggtctcactccttggaggccatgtgg

SEQ ID NO: 348 - RNA, 43 nt, synthetic construct
  source 1..43: mol_type = other RNA
tgtgctcttgctggggctggtggtctgggggtcttactggtct

SEQ ID NO: 349 - RNA, 41 nt, synthetic construct
  source 1..41: mol_type = other RNA
tgtgctcttgctggggctggtggtctaagggtctcattcct

SEQ ID NO: 350 - RNA, 39 nt, synthetic construct
  source 1..39: mol_type = other RNA
ggctggtggtccagggtccttacttctgaggccatgtgg

SEQ ID NO: 351 - RNA, 41 nt, synthetic construct
  source 1..41: mol_type = other RNA
gggtctcactcattggaggccatgtgggccatgaggtccac

SEQ ID NO: 352 - RNA, 43 nt, synthetic construct
  source 1..43: mol_type = other RNA
tgtgctcttgctggggctggaggtctgggggtctcacagtcct

SEQ ID NO: 353 - RNA, 43 nt, synthetic construct
  source 1..43: mol_type = other RNA
ggctggtggtctgggggtctcacagtccttggaggccatgtgg

SEQ ID NO: 354 - RNA, 41 nt, synthetic construct
  source 1..41: mol_type = other RNA
gggtctcgctccttggaggccatgtgggccatgaggtccac

SEQ ID NO: 355 - RNA, 41 nt, synthetic construct
  source 1..41: mol_type = other RNA
gagtcttactctttggaggccatgtgggccatgaggtccac

SEQ ID NO: 356 - RNA, 41 nt, synthetic construct
  source 1..41: mol_type = other RNA
gggtcttattccttggaggccatgtgggccatgaggtccac

SEQ ID NO: 357 - RNA, 43 nt, synthetic construct
  source 1..43: mol_type = other RNA
tgtgctcttgctggggctggtggtccaggtctcaaaaactcct

SEQ ID NO: 358 - RNA, 41 nt, synthetic construct
  source 1..41: mol_type = other RNA
gggtcctattccttgggggccatgtgggccatgaggtccac

SEQ ID NO: 359 - RNA, 41 nt, synthetic construct
  source 1..41: mol_type = other RNA
ggctggtggtccaggggtcttactccccggaggccatgtgg

SEQ ID NO: 360 - RNA, 41 nt, synthetic construct
  source 1..41: mol_type = other RNA
gagtctcacttcttggaggccatgtgggccatgaggtccac

SEQ ID NO: 361 - RNA, 41 nt, synthetic construct
  source 1..41: mol_type = other RNA
gggtctcactcttctcaggccatgtgggccatgaggtccac

SEQ ID NO: 362 - RNA, 41 nt, synthetic construct
  source 1..41: mol_type = other RNA
gggtcttactcattggaggccatgtgggccatgaggtccac

SEQ ID NO: 363 - RNA, 43 nt, synthetic construct
  source 1..43: mol_type = other RNA
gggtctcactccttggcaaggctatgtgggccatgaggtccac

SEQ ID NO: 364 - RNA, 41 nt, synthetic construct
  source 1..41: mol_type = other RNA
ggtactcactccttggaggccatgtgggccatgaggtccac

SEQ ID NO: 365 - RNA, 41 nt, synthetic construct
  source 1..41: mol_type = other RNA
ggctggtggtccaagggtcttactcattggaggccatgtgg

SEQ ID NO: 366 - RNA, 41 nt, synthetic construct
  source 1..41: mol_type = other RNA
gggtctcactttttggaggccatgtgggccatgaggtccac

SEQ ID NO: 367 - RNA, 41 nt, synthetic construct
  source 1..41: mol_type = other RNA
gggtcccattccttgggggccatgtgggccatgaggtccac

SEQ ID NO: 368 - RNA, 40 nt, synthetic construct
  source 1..40: mol_type = other RNA
ggtttcactccttggaggccatgtgggccatgaggtccac

SEQ ID NO: 369 - RNA, 41 nt, synthetic construct
  source 1..41: mol_type = other RNA
gaatctcagtccttggaggccatgtgggccatgaggtccac

SEQ ID NO: 370 - RNA, 42 nt, synthetic construct
  source 1..42: mol_type = other RNA
ggctggtggtccgcgggtctctactccttggaggccatgtgg

SEQ ID NO: 371 - RNA, 44 nt, synthetic construct
  source 1..44: mol_type = other RNA
tgtgctcttgctggggctggggtccaggggtctcactataccct

SEQ ID NO: 372 - RNA, 41 nt, synthetic construct
  source 1..41: mol_type = other RNA
gagtcttgcttcttggaggccatgtgggccatgaggtccac

SEQ ID NO: 373 - RNA, 41 nt, synthetic construct
  source 1..41: mol_type = other RNA
ggctggtggtccaagggtcttactccttggaggccatgtgg

SEQ ID NO: 374 - RNA, 41 nt, synthetic construct
  source 1..41: mol_type = other RNA
gggtcccactccttaccggccatgtgggccatgaggtccac

SEQ ID NO: 375 - RNA, 41 nt, synthetic construct
  source 1..41: mol_type = other RNA
gggtctcactccctggaggccatgtgggccatgaggtccac

SEQ ID NO: 376 - RNA, 41 nt, synthetic construct
  source 1..41: mol_type = other RNA
ggttctcactcacccgaggccatgtgggccatgaggtccac

SEQ ID NO: 377 - RNA, 42 nt, synthetic construct
  source 1..42: mol_type = other RNA
gggtctcactcctctggaggccatgtgggccatgaggtccac

SEQ ID NO: 378 - RNA, 41 nt, synthetic construct
  source 1..41: mol_type = other RNA
gggtctcactggttggaggccatgtgggccatgaggtccac

SEQ ID NO: 379 - RNA, 41 nt, synthetic construct
  source 1..41: mol_type = other RNA
gggtctcactcattgggggccatgtgggccatgaggtccac

SEQ ID NO: 380 - RNA, 41 nt, synthetic construct
  source 1..41: mol_type = other RNA
ggctggtggtccaggggtctcactccccggaggccatgtgg

SEQ ID NO: 381 - RNA, 42 nt, synthetic construct
  source 1..42: mol_type = other RNA
gggtctcacctaactggaggccatgtgggccatgaggtccac

SEQ ID NO: 382 - RNA, 42 nt, synthetic construct
  source 1..42: mol_type = other RNA
tgtgctcttgctggggctggtggtctaggagtcctcctacct

SEQ ID NO: 383 - RNA, 39 nt, synthetic construct
  source 1..39: mol_type = other RNA
gaggtctcactccttggccatgtgggccatgaggtccac

SEQ ID NO: 384 - RNA, 43 nt, synthetic construct
  source 1..43: mol_type = other RNA
tgtgctcttgctggggctggaggtctgggggtcttacagtcct

SEQ ID NO: 385 - RNA, 41 nt, synthetic construct
  source 1..41: mol_type = other RNA
tgtgctcttgctggggctggtggtcccaggggactactcct

SEQ ID NO: 386 - RNA, 40 nt, synthetic construct
  source 1..40: mol_type = other RNA
ggctggtggttcaggggttcactccttggaggccatgtgg

SEQ ID NO: 387 - RNA, 41 nt, synthetic construct
  source 1..41: mol_type = other RNA
gggtcccactccttggcagctatgtgggccatgaggtccac

SEQ ID NO: 388 - RNA, 41 nt, synthetic construct
  source 1..41: mol_type = other RNA
gggtttcactttttggaggttatgtgggccatgaggtccac

SEQ ID NO: 389 - RNA, 41 nt, synthetic construct
  source 1..41: mol_type = other RNA
gggtctcactccttggtggccatgtgggccatgaggtccac

SEQ ID NO: 390 - RNA, 42 nt, synthetic construct
  source 1..42: mol_type = other RNA
ggctggtggtccaggggtcttacctaactggaggccatgtgg

SEQ ID NO: 391 - RNA, 41 nt, synthetic construct
  source 1..41: mol_type = other RNA
tgtgctcttgctggggctggtggtacaggaatctcagtcct

SEQ ID NO: 392 - RNA, 41 nt, synthetic construct
  source 1..41: mol_type = other RNA
ggctggtggtacagcaatttcactcttcggaggccatgtgg

SEQ ID NO: 393 - RNA, 40 nt, synthetic construct
  source 1..40: mol_type = other RNA
gggtctcactccttggggccatgtgggccatgaggtccac

SEQ ID NO: 394 - RNA, 41 nt, synthetic construct
  source 1..41: mol_type = other RNA
gggtctcactccttggaagccatgtgggccatgaggtccac

SEQ ID NO: 395 - RNA, 41 nt, synthetic construct
  source 1..41: mol_type = other RNA
gggtctcactacttggtggttatgtgggccatgaggtccac

SEQ ID NO: 396 - RNA, 41 nt, synthetic construct
  source 1..41: mol_type = other RNA
gggtctcactcctcggaggccatgtgggccatgaggtccac

SEQ ID NO: 397 - RNA, 45 nt, synthetic construct
  source 1..45: mol_type = other RNA
gggtctcacttctaacaaagaggccatgtgggccatgaggtccac

SEQ ID NO: 398 - RNA, 41 nt, synthetic construct
  source 1..41: mol_type = other RNA
gggtcttactggttggaggccatgtgggccatgaggtccac

SEQ ID NO: 399 - RNA, 41 nt, synthetic construct
  source 1..41: mol_type = other RNA
gggtctcactccatggaagccatgtgggccatgaggtccac

SEQ ID NO: 400 - RNA, 45 nt, synthetic construct
  source 1..45: mol_type = other RNA
ggatctcactcctgaaaaggacgccatgtgggccatgaggtccac

SEQ ID NO: 401 - RNA, 41 nt, synthetic construct
  source 1..41: mol_type = other RNA
gggcctcactccttggtagccatgtgggccatgaggtccac

SEQ ID NO: 402 - RNA, 41 nt, synthetic construct
  source 1..41: mol_type = other RNA
ggctggtggtccagggatctcagtccctgggggccatgtgg

SEQ ID NO: 403 - RNA, 41 nt, synthetic construct
  source 1..41: mol_type = other RNA
gggtcttactcattgggggccatgtgggccatgaggtccac

SEQ ID NO: 404 - RNA, 41 nt, synthetic construct
  source 1..41: mol_type = other RNA
gggtctcactccatggaggccatgtgggccatgaggtccac

SEQ ID NO: 405 - RNA, 41 nt, synthetic construct
  source 1..41: mol_type = other RNA
gggcttcacttcttggaggccatgtgggccatgaggtccac

SEQ ID NO: 406 - RNA, 41 nt, synthetic construct
  source 1..41: mol_type = other RNA
gggtctcactccttaccagccatgtgggccatgaggtccac

SEQ ID NO: 407 - RNA, 41 nt, synthetic construct
  source 1..41: mol_type = other RNA
ggttctcactccttggaggccatgtgggccatgaggtccac

SEQ ID NO: 408 - RNA, 41 nt, synthetic construct
  source 1..41: mol_type = other RNA
gggtctcactccttaccggccatgtgggccatgaggtccac

SEQ ID NO: 409 - RNA, 41 nt, synthetic construct
  source 1..41: mol_type = other RNA
ggctggtggtacaagggtctcactccctggaggccatgtgg

SEQ ID NO: 410 - RNA, 41 nt, synthetic construct
  source 1..41: mol_type = other RNA
tgtgctcttgctggggctggtggtgcaggggtctctctcct

SEQ ID NO: 411 - RNA, 41 nt, synthetic construct
  source 1..41: mol_type = other RNA
gggtttcactacttggaggccatgtgggccatgaggtccac

SEQ ID NO: 412 - RNA, 41 nt, synthetic construct
  source 1..41: mol_type = other RNA
gggtctcactccttgcagaccatgtgggccatgaggtccac

SEQ ID NO: 413 - RNA, 50 nt, synthetic construct
  source 1..50: mol_type = other RNA
tgtgctcttgctggggctggtggtccaggggtctcaaaaaaaaaactcct

SEQ ID NO: 414 - RNA, 41 nt, synthetic construct
  source 1..41: mol_type = other RNA
gagtcttacttcttggaggccatgtgggccatgaggtccac

SEQ ID NO: 415 - RNA, 41 nt, synthetic construct
  source 1..41: mol_type = other RNA
ggctggtggtctaggggtctcgctccttggaggccatgtgg

SEQ ID NO: 416 - RNA, 41 nt, synthetic construct
  source 1..41: mol_type = other RNA
gggcctcactcttacaaggccatgtgggccatgaggtccac

SEQ ID NO: 417 - RNA, 41 nt, synthetic construct
  source 1..41: mol_type = other RNA
gggtctcactttttataggccatgtgggccatgaggtccac

SEQ ID NO: 418 - RNA, 41 nt, synthetic construct
  source 1..41: mol_type = other RNA
gggtcttactccttgtaggccatgtgggccatgaggtccac

SEQ ID NO: 419 - RNA, 43 nt, synthetic construct
  source 1..43: mol_type = other RNA
gggtcttacagtccttggaggccatgtgggccatgaggtccac

SEQ ID NO: 420 - RNA, 41 nt, synthetic construct
  source 1..41: mol_type = other RNA
tgtgctcttgctggggctggtggtctaggggtcttgctcct

SEQ ID NO: 421 - RNA, 45 nt, synthetic construct
  source 1..45: mol_type = other RNA
ggctggtggtccgggggtctaactatacccttggaggccatgtgg

SEQ ID NO: 422 - RNA, 41 nt, synthetic construct
  source 1..41: mol_type = other RNA
gggtcccactccttggcggctatgtgggccatgaggtccac

SEQ ID NO: 423 - RNA, 41 nt, synthetic construct
  source 1..41: mol_type = other RNA
tgtgctcttgctggggctggtggtcccggagtctcgcttct

SEQ ID NO: 424 - RNA, 41 nt, synthetic construct
  source 1..41: mol_type = other RNA
cggtctcactccttggaggccatgtgggccatgaggtccac

SEQ ID NO: 425 - RNA, 41 nt, synthetic construct
  source 1..41: mol_type = other RNA
gggtctcactcctttgagcccatgtgggccatgaggtccac

SEQ ID NO: 426 - RNA, 41 nt, synthetic construct
  source 1..41: mol_type = other RNA
gggtctcactcgtccccggccatgtgggccatgaggtccac

SEQ ID NO: 427 - RNA, 44 nt, synthetic construct
  source 1..44: mol_type = other RNA
tgtgctcttgctggggctggggtccaggggtctaactataccct

SEQ ID NO: 428 - RNA, 41 nt, synthetic construct
  source 1..41: mol_type = other RNA
gggtcccactccttggagatcatgtgggccatgaggtccac

SEQ ID NO: 429 - RNA, 41 nt, synthetic construct
  source 1..41: mol_type = other RNA
ggctggtggtcccggggactcagtccttggaggccatgtgg

SEQ ID NO: 430 - RNA, 41 nt, synthetic construct
  source 1..41: mol_type = other RNA
tgtgctcttgctggggctggtggcgcagggtccccactact

SEQ ID NO: 431 - RNA, 41 nt, synthetic construct
  source 1..41: mol_type = other RNA
gggttccactccttggaggccatgtgggccatgaggtccac

SEQ ID NO: 432 - RNA, 41 nt, synthetic construct
  source 1..41: mol_type = other RNA
gggcctcactccttgaaggccatgtgggccatgaggtccac

SEQ ID NO: 433 - RNA, 41 nt, synthetic construct
  source 1..41: mol_type = other RNA
gggtcccactcattggtggctatgtgggccatgaggtccac

SEQ ID NO: 434 - RNA, 43 nt, synthetic construct
  source 1..43: mol_type = other RNA
ggctggtggtccaggggtaccactcttttgtaaggccatgtgg

SEQ ID NO: 435 - RNA, 41 nt, synthetic construct
  source 1..41: mol_type = other RNA
gagtctcactctttggaggccatgtgggccatgaggtccac

SEQ ID NO: 436 - RNA, 45 nt, synthetic construct
  source 1..45: mol_type = other RNA
ggctggtggtccgggggtctcactatacccttggaggccatgtgg

SEQ ID NO: 437 - RNA, 41 nt, synthetic construct
  source 1..41: mol_type = other RNA
gagtctcactccttggaggccatgtgggccatgaggtccac

SEQ ID NO: 438 - RNA, 41 nt, synthetic construct
  source 1..41: mol_type = other RNA
gggccttactcctcggaggccatgtgggccatgaggtccac

SEQ ID NO: 439 - RNA, 41 nt, synthetic construct
  source 1..41: mol_type = other RNA
gggtctcactccttgaaggccatgtgggccatgaggtccac

SEQ ID NO: 440 - RNA, 41 nt, synthetic construct
  source 1..41: mol_type = other RNA
tgtgctcttgctggggctggtagtccaggggtctcgctcct

SEQ ID NO: 441 - RNA, 41 nt, synthetic construct
  source 1..41: mol_type = other RNA
ggctggtggtccaggggtcttactccctggaggccatgtgg

SEQ ID NO: 442 - RNA, 39 nt, synthetic construct
  source 1..39: mol_type = other RNA
tgtgctcttgctggggctggtggtccaggggtccctgag

SEQ ID NO: 443 - RNA, 41 nt, synthetic construct
  source 1..41: mol_type = other RNA
gggtctcactttctggaggccatgtgggccatgaggtccac

SEQ ID NO: 444 - RNA, 42 nt, synthetic construct
  source 1..42: mol_type = other RNA
gggtactcactaattggaggccatgtgggccatgaggtccac

SEQ ID NO: 445 - RNA, 41 nt, synthetic construct
  source 1..41: mol_type = other RNA
gagtctcgcttcttggaggccatgtgggccatgaggtccac

SEQ ID NO: 446 - RNA, 41 nt, synthetic construct
  source 1..41: mol_type = other RNA
ggctggtggtgcaggggtctctttccttggaggccatgtgg

SEQ ID NO: 447 - RNA, 42 nt, synthetic construct
  source 1..42: mol_type = other RNA
ggggtctcactccttcgcggcgatgtgggccatgaggtccac

SEQ ID NO: 448 - RNA, 43 nt, synthetic construct
  source 1..43: mol_type = other RNA
gggtctcactggttttggaggccatgtgggccatgaggtccac

SEQ ID NO: 449 - RNA, 41 nt, synthetic construct
  source 1..41: mol_type = other RNA
gggtctcactccgtggaggccatgtgggccatgaggtccac

SEQ ID NO: 450 - RNA, 40 nt, synthetic construct
  source 1..40: mol_type = other RNA
ggctggtggtcagcggtcttactccttggaggccatgtgg

SEQ ID NO: 451 - RNA, 41 nt, synthetic construct
  source 1..41: mol_type = other RNA
gagtctcaatccttggaggccatgtgggccatgaggtccac

SEQ ID NO: 452 - RNA, 41 nt, synthetic construct
  source 1..41: mol_type = other RNA
gggtctcacttcttggaggccatgtgggccatgaggtccac

SEQ ID NO: 453 - RNA, 41 nt, synthetic construct
  source 1..41: mol_type = other RNA
gggtctcactccttgtaggccatgtgggccatgaggtccac

SEQ ID NO: 454 - RNA, 37 nt, synthetic construct
  source 1..37: mol_type = other RNA
ggctggtggtgggtcttactccttggaggccatgtgg

SEQ ID NO: 455 - RNA, 41 nt, synthetic construct
  source 1..41: mol_type = other RNA
gggtcttacttcttggaggccatgtgggccatgaggtccac

SEQ ID NO: 456 - RNA, 41 nt, synthetic construct
  source 1..41: mol_type = other RNA
aaggttccactctttgaggccatgtgggccatgaggtccac

SEQ ID NO: 457 - RNA, 41 nt, synthetic construct
  source 1..41: mol_type = other RNA
ggatctcactccttagaggcaatgtgggccatgaggtccac

SEQ ID NO: 458 - RNA, 40 nt, synthetic construct
  source 1..40: mol_type = other RNA
ggctggtggtcagcggtctcactccttggaggccatgtgg

SEQ ID NO: 459 - RNA, 41 nt, synthetic construct
  source 1..41: mol_type = other RNA
ggctggtggtctaggggtctcattccttgggggccatgtgg

SEQ ID NO: 460 - RNA, 41 nt, synthetic construct
  source 1..41: mol_type = other RNA
ggggctcacttcttggtggccatgtgggccatgaggtccac

SEQ ID NO: 461 - RNA, 41 nt, synthetic construct
  source 1..41: mol_type = other RNA
gggtctcactcagtggaggccatgtgggccatgaggtccac

SEQ ID NO: 462 - RNA, 41 nt, synthetic construct
  source 1..41: mol_type = other RNA
gggtctcactccccggaggccatgtgggccatgaggtccac

SEQ ID NO: 463 - RNA, 41 nt, synthetic construct
  source 1..41: mol_type = other RNA
tgtgctcttgctggggctggtggtcacgtggcctcgctcct

SEQ ID NO: 464 - RNA, 41 nt, synthetic construct
  source 1..41: mol_type = other RNA
gggcctcactcctcggaggccatgtgggccatgaggtccac

SEQ ID NO: 465 - RNA, 44 nt, synthetic construct
  source 1..44: mol_type = other RNA
ggctggtggtccaggggcaaacaaactccttggaggccatgtgg

SEQ ID NO: 466 - RNA, 41 nt, synthetic construct
  source 1..41: mol_type = other RNA
ggctggtggtacaggaatctcagtccttggaggccatgtgg

SEQ ID NO: 467 - RNA, 41 nt, synthetic construct
  source 1..41: mol_type = other RNA
tgtgctcttgctggggctggtggtcccaggggaccactcct

SEQ ID NO: 468 - RNA, 42 nt, synthetic construct
  source 1..42: mol_type = other RNA
gggtctccactccttggaggccatgtgggccatgaggtccac

SEQ ID NO: 469 - RNA, 40 nt, synthetic construct
  source 1..40: mol_type = other RNA
ggctggtggttgggggtctcacttcttggaggccatgtgg

SEQ ID NO: 470 - RNA, 41 nt, synthetic construct
  source 1..41: mol_type = other RNA
ggatctcactccttggaggccatgtgggccatgaggtccac

SEQ ID NO: 471 - RNA, 43 nt, synthetic construct
  source 1..43: mol_type = other RNA
tccagtctcactcattggaggccatgtgggccatgaggtccac

SEQ ID NO: 472 - RNA, 42 nt, synthetic construct
  source 1..42: mol_type = other RNA
ggctggtggtccctgggccttactcgttggtgggccatgtgg

SEQ ID NO: 473 - RNA, 41 nt, synthetic construct
  source 1..41: mol_type = other RNA
ggctggtggtccaggggtcccgctccttggaggccatgtgg

SEQ ID NO: 474 - RNA, 41 nt, synthetic construct
  source 1..41: mol_type = other RNA
ggctggtggtccaggggtcctgctccttggaggccatgtgg

SEQ ID NO: 475 - RNA, 41 nt, synthetic construct
  source 1..41: mol_type = other RNA
gggtctcactccttgcaggagatgtgggccatgaggtccac

SEQ ID NO: 476 - RNA, 41 nt, synthetic construct
  source 1..41: mol_type = other RNA
gggtcttactccccggaggccatgtgggccatgaggtccac

SEQ ID NO: 477 - RNA, 41 nt, synthetic construct
  source 1..41: mol_type = other RNA
gggtctcactccgtggaggcgatgtgggccatgaggtccac

SEQ ID NO: 478 - RNA, 43 nt, synthetic construct
  source 1..43: mol_type = other RNA
ggctggtggtctggaggtcttacagtccttggaggccatgtgg

SEQ ID NO: 479 - RNA, 41 nt, synthetic construct
  source 1..41: mol_type = other RNA
tgtgctcttgctggggctggtgatacaggggtctcagtact

SEQ ID NO: 480 - RNA, 41 nt, synthetic construct
  source 1..41: mol_type = other RNA
gggtcttactctccagaggccatgtgggccatgaggtccac

SEQ ID NO: 481 - RNA, 41 nt, synthetic construct
  source 1..41: mol_type = other RNA
ggatctcactccttagaggacatgtgggccatgaggtccac

SEQ ID NO: 482 - RNA, 41 nt, synthetic construct
  source 1..41: mol_type = other RNA
tgtgctcttgctggggctggtgctccagtggtttcaacact

SEQ ID NO: 483 - RNA, 41 nt, synthetic construct
  source 1..41: mol_type = other RNA
gagtctcactccttggacgccatgtgggccatgaggtccac

SEQ ID NO: 484 - RNA, 41 nt, synthetic construct
  source 1..41: mol_type = other RNA
gggtctcactccttggagaacatgtgggccatgaggtccac

SEQ ID NO: 485 - RNA, 41 nt, synthetic construct
  source 1..41: mol_type = other RNA
tgtgctcttgctggggctggtggtccaggggtcttattccc

SEQ ID NO: 486 - RNA, 41 nt, synthetic construct
  source 1..41: mol_type = other RNA
ggctcttactccttggaggccatgtgggccatgaggtccac

SEQ ID NO: 487 - RNA, 42 nt, synthetic construct
  source 1..42: mol_type = other RNA
cggtctcactccttggagactcatgtgggccatgaggtccac

SEQ ID NO: 488 - RNA, 41 nt, synthetic construct
  source 1..41: mol_type = other RNA
gggtctcacttcttaggacgcatgtgggccatgaggtccac

SEQ ID NO: 489 - RNA, 41 nt, synthetic construct
  source 1..41: mol_type = other RNA
tagtctcactccttgaaggccatgtgggccatgaggtccac

SEQ ID NO: 490 - RNA, 41 nt, synthetic construct
  source 1..41: mol_type = other RNA
gggtctcactccttggaggccatgtgggccatgaggtccac

SEQ ID NO: 491 - RNA, 42 nt, synthetic construct
  source 1..42: mol_type = other RNA
ggctggtggtccaggggtcccctgagtatggaggccatgtgg

SEQ ID NO: 492 - RNA, 39 nt, synthetic construct
  source 1..39: mol_type = other RNA
gggtctcactcattggaggatgtgggccatgaggtccac

SEQ ID NO: 493 - RNA, 41 nt, synthetic construct
  source 1..41: mol_type = other RNA
ggatgtcactccttggaggccatgtgggccatgaggtccac

SEQ ID NO: 494 - RNA, 41 nt, synthetic construct
  source 1..41: mol_type = other RNA
gggtcttactccttgaaggccatgtgggccatgaggtccac

SEQ ID NO: 495 - RNA, 41 nt, synthetic construct
  source 1..41: mol_type = other RNA
ggctggtggtccatgggtaccactccttggaggccatgtgg

SEQ ID NO: 496 - RNA, 44 nt, synthetic construct
  source 1..44: mol_type = other RNA
ggctctcactccttcctcgaggctatgtgggccatgaggtccac

SEQ ID NO: 497 - RNA, 41 nt, synthetic construct
  source 1..41: mol_type = other RNA
tgtgctcttgctggggctggtggtccagggatcttagtccc

SEQ ID NO: 498 - RNA, 41 nt, synthetic construct
  source 1..41: mol_type = other RNA
cggtcttactccttggaggccatgtgggccatgaggtccac

SEQ ID NO: 499 - RNA, 41 nt, synthetic construct
  source 1..41: mol_type = other RNA
gggtcttactcctcggaggccatgtgggccatgaggtccac

SEQ ID NO: 500 - RNA, 43 nt, synthetic construct
  source 1..43: mol_type = other RNA
accagtctcactcattggaggccatgtgggccatgaggtccac

SEQ ID NO: 501 - RNA, 42 nt, synthetic construct
  source 1..42: mol_type = other RNA
tgtgctcttgctggggctggtggtctaggagtccccctacct

SEQ ID NO: 502 - RNA, 41 nt, synthetic construct
  source 1..41: mol_type = other RNA
gggtcttactccatggaggccatgtgggccatgaggtccac

SEQ ID NO: 503 - RNA, 40 nt, synthetic construct
  source 1..40: mol_type = other RNA
ggtctcactccttggaggaaatgtgggccatgaggtccac

SEQ ID NO: 504 - RNA, 42 nt, synthetic construct
  source 1..42: mol_type = other RNA
ggatcttactcccctcgaggccatgtgggccatgaggtccac

SEQ ID NO: 505 - RNA, 41 nt, synthetic construct
  source 1..41: mol_type = other RNA
gggtctcactctttggacgccatgtgggccatgaggtccac

SEQ ID NO: 506 - RNA, 45 nt, synthetic construct
  source 1..45: mol_type = other RNA
gggtctaactatacccttggaggtcatgtgggccatgaggtccac

SEQ ID NO: 507 - RNA, 41 nt, synthetic construct
  source 1..41: mol_type = other RNA
gggtcttactccttggaggccatgtgggccatgaggtccac

SEQ ID NO: 508 - RNA, 40 nt, synthetic construct
  source 1..40: mol_type = other RNA
gggttcactccttggaggccatgtgggccatgaggtccac

SEQ ID NO: 509 - RNA, 41 nt, synthetic construct
  source 1..41: mol_type = other RNA
gggccttactccttggtagccatgtgggccatgaggtccac

SEQ ID NO: 510 - RNA, 41 nt, synthetic construct
  source 1..41: mol_type = other RNA
ggggcttacttcttggtggccatgtgggccatgaggtccac

SEQ ID NO: 511 - RNA, 41 nt, synthetic construct
  source 1..41: mol_type = other RNA
gggtctcactccttagagggcatgtgggccatgaggtccac

SEQ ID NO: 512 - RNA, 45 nt, synthetic construct
  source 1..45: mol_type = other RNA
gggtctcactatacccttggaggtcatgtgggccatgaggtccac

SEQ ID NO: 513 - RNA, 39 nt, synthetic construct
  source 1..39: mol_type = other RNA
gggtctcacagtggaggccatgtgggccatgaggtccac

SEQ ID NO: 514 - RNA, 41 nt, synthetic construct
  source 1..41: mol_type = other RNA
gggtctcacctctcggaggccatgtgggccatgaggtccac

SEQ ID NO: 515 - RNA, 41 nt, synthetic construct
  source 1..41: mol_type = other RNA
gggtctcactccttggagtgaatgtgggccatgaggtccac

SEQ ID NO: 516 - RNA, 41 nt, synthetic construct
  source 1..41: mol_type = other RNA
gggtcttactccttaccagccatgtgggccatgaggtccac

SEQ ID NO: 517 - RNA, 42 nt, synthetic construct
  source 1..42: mol_type = other RNA
ggctggtggtccgcgggtctccactccttggaggccatgtgg

SEQ ID NO: 518 - RNA, 46 nt, synthetic construct
  source 1..46: mol_type = other RNA
gggcctcactcgttggtgggttagctatgtgggccatgaggtccac

SEQ ID NO: 519 - RNA, 41 nt, synthetic construct
  source 1..41: mol_type = other RNA
gggtcttacctctcggaggccatgtgggccatgaggtccac

SEQ ID NO: 520 - RNA, 41 nt, synthetic construct
  source 1..41: mol_type = other RNA
gggtgttactccatggaggtcatgtgggccatgaggtccac

SEQ ID NO: 521 - RNA, 41 nt, synthetic construct
  source 1..41: mol_type = other RNA
ggggctcacttcttggcggccatgtgggccatgaggtccac

SEQ ID NO: 522 - RNA, 40 nt, synthetic construct
  source 1..40: mol_type = other RNA
gggtcttactcttggaggccatgtgggccatgaggtccac

SEQ ID NO: 523 - RNA, 41 nt, synthetic construct
  source 1..41: mol_type = other RNA
gggtcttactcttctcaggccatgtgggccatgaggtccac

SEQ ID NO: 524 - RNA, 41 nt, synthetic construct
  source 1..41: mol_type = other RNA
gggtctcagtacttggaggccatgtgggccatgaggtccac

SEQ ID NO: 525 - RNA, 41 nt, synthetic construct
  source 1..41: mol_type = other RNA
gggtctcactccttagaggacatgtgggccatgaggtccac

SEQ ID NO: 526 - RNA, 39 nt, synthetic construct
  source 1..39: mol_type = other RNA
ggtcctcacttctgaggccatgtgggccatgaggtccac

SEQ ID NO: 527 - RNA, 41 nt, synthetic construct
  source 1..41: mol_type = other RNA
gggtctcactaattggcggcgatgtgggccatgaggtccac

SEQ ID NO: 528 - RNA, 42 nt, synthetic construct
  source 1..42: mol_type = other RNA
ggggtctcactaattggcggcgatgtgggccatgaggtccac

SEQ ID NO: 529 - RNA, 44 nt, synthetic construct
  source 1..44: mol_type = other RNA
ggctggtggtggggggtttaactatacccttggaggccatgtgg

SEQ ID NO: 530 - RNA, 41 nt, synthetic construct
  source 1..41: mol_type = other RNA
gaacctcactcctttggggccatgtgggccatgaggtccac

SEQ ID NO: 531 - RNA, 41 nt, synthetic construct
  source 1..41: mol_type = other RNA
gggactcagtccttggaggccatgtgggccatgaggtccac

SEQ ID NO: 532 - RNA, 41 nt, synthetic construct
  source 1..41: mol_type = other RNA
tgtgctcttgctggggctggtggtcccggggtatctctcct

SEQ ID NO: 533 - RNA, 41 nt, synthetic construct
  source 1..41: mol_type = other RNA
ggctctcactccttggaggccatgtgggccatgaggtccac

SEQ ID NO: 534 - RNA, 41 nt, synthetic construct
  source 1..41: mol_type = other RNA
ggctggtggtataggggtctcagtacttggaggccatgtgg

SEQ ID NO: 535 - RNA, 41 nt, synthetic construct
  source 1..41: mol_type = other RNA
ggtcctcactacttggaggacatgtgggccatgaggtccac

SEQ ID NO: 536 - RNA, 40 nt, synthetic construct
  source 1..40: mol_type = other RNA
ggctggtggtccagggttacactcctaggaggccatgtgg

SEQ ID NO: 537 - RNA, 41 nt, synthetic construct
  source 1..41: mol_type = other RNA
gggtcttactccatggaagccatgtgggccatgaggtccac

SEQ ID NO: 538 - RNA, 43 nt, synthetic construct
  source 1..43: mol_type = other RNA
gggtctcacagtccttggaggccatgtgggccatgaggtccac

SEQ ID NO: 539 - RNA, 43 nt, synthetic construct
  source 1..43: mol_type = other RNA
gggtcttactggttttggaggccatgtgggccatgaggtccac

SEQ ID NO: 540 - RNA, 41 nt, synthetic construct
  source 1..41: mol_type = other RNA
cggtatcactacttggaggccatgtgggccatgaggtccac

SEQ ID NO: 541 - RNA, 41 nt, synthetic construct
  source 1..41: mol_type = other RNA
gggtctcactatttggaggccatgtgggccatgaggtccac

SEQ ID NO: 542 - RNA, 39 nt, synthetic construct
  source 1..39: mol_type = other RNA
gaggtcttactccttggccatgtgggccatgaggtccac

SEQ ID NO: 543 - RNA, 41 nt, synthetic construct
  source 1..41: mol_type = other RNA
ggctggtggtccagggctcttgctccttggcggccatgtgg

SEQ ID NO: 544 - RNA, 47 nt, synthetic construct
  source 1..47: mol_type = other RNA
tgtgctcttgctggggctggtatagtcccaggggcaaacaaactcct

SEQ ID NO: 545 - RNA, 41 nt, synthetic construct
  source 1..41: mol_type = other RNA
tgtgctcttgctggggctggtggtcacgtggccttgctcct

SEQ ID NO: 546 - RNA, 41 nt, synthetic construct
  source 1..41: mol_type = other RNA
ggctggtggttcaggggtctcgctcctttgaggccatgtgg

SEQ ID NO: 547 - RNA, 40 nt, synthetic construct
  source 1..40: mol_type = other RNA
tgtgctcttgctggggctggtgatccaggagtctcctcct

SEQ ID NO: 548 - RNA, 41 nt, synthetic construct
  source 1..41: mol_type = other RNA
gggtcttactccttggaagccatgtgggccatgaggtccac

SEQ ID NO: 549 - RNA, 41 nt, synthetic construct
  source 1..41: mol_type = other RNA
gggtcttactcagtggaggccatgtgggccatgaggtccac

SEQ ID NO: 550 - RNA, 41 nt, synthetic construct
  source 1..41: mol_type = other RNA
gggcctcactaattggcggcaatgtgggccatgaggtccac

SEQ ID NO: 551 - RNA, 41 nt, synthetic construct
  source 1..41: mol_type = other RNA
gagtctcactccttggaggacatgtgggccatgaggtccac

SEQ ID NO: 552 - RNA, 41 nt, synthetic construct
  source 1..41: mol_type = other RNA
ggctggtggtcccggggtatctctcctcggaggccatgtgg

SEQ ID NO: 553 - RNA, 41 nt, synthetic construct
  source 1..41: mol_type = other RNA
ggtacttactccttggaggccatgtgggccatgaggtccac

SEQ ID NO: 554 - RNA, 41 nt, synthetic construct
  source 1..41: mol_type = other RNA
gggtgtcactccatggaggtcatgtgggccatgaggtccac

SEQ ID NO: 555 - RNA, 42 nt, synthetic construct
  source 1..42: mol_type = other RNA
gggtctctactccttggaggccatgtgggccatgaggtccac

SEQ ID NO: 556 - RNA, 40 nt, synthetic construct
  source 1..40: mol_type = other RNA
ggctggtggtccaggagtctcctccttggaggccatgtgg

SEQ ID NO: 557 - RNA, 41 nt, synthetic construct
  source 1..41: mol_type = other RNA
ggatctcagtccctgggggccatgtgggccatgaggtccac

SEQ ID NO: 558 - RNA, 42 nt, synthetic construct
  source 1..42: mol_type = other RNA
gggtcatcactttttaaaggccatgtgggccatgaggtccac

SEQ ID NO: 559 - RNA, 43 nt, synthetic construct
  source 1..43: mol_type = other RNA
gggtcttactccttggcaaggctatgtgggccatgaggtccac

SEQ ID NO: 560 - RNA, 41 nt, synthetic construct
  source 1..41: mol_type = other RNA
tgtgctcttgctggggctggtggtcccggagtcttgcttct

SEQ ID NO: 561 - RNA, 41 nt, synthetic construct
  source 1..41: mol_type = other RNA
cggtctcactacccggaagccatgtgggccatgaggtccac

SEQ ID NO: 562 - RNA, 41 nt, synthetic construct
  source 1..41: mol_type = other RNA
gggtcctactccttggagatcatgtgggccatgaggtccac

SEQ ID NO: 563 - RNA, 41 nt, synthetic construct
  source 1..41: mol_type = other RNA
ggggaccacttcttggtggtgatgtgggccatgaggtccac

SEQ ID NO: 564 - RNA, 40 nt, synthetic construct
  source 1..40: mol_type = other RNA
ggttttactccttggaggccatgtgggccatgaggtccac

SEQ ID NO: 565 - RNA, 40 nt, synthetic construct
  source 1..40: mol_type = other RNA
gggtctcacttttggctgagatgtgggccatgaggtccac

SEQ ID NO: 566 - RNA, 41 nt, synthetic construct
  source 1..41: mol_type = other RNA
gaatctcactccttggcggcaatgtgggccatgaggtccac

SEQ ID NO: 567 - RNA, 41 nt, synthetic construct
  source 1..41: mol_type = other RNA
gggtctcgctccttagaggacatgtgggccatgaggtccac

SEQ ID NO: 568 - RNA, 41 nt, synthetic construct
  source 1..41: mol_type = other RNA
ggctggtggtcccggagtctcgcttcttggaggccatgtgg

SEQ ID NO: 569 - RNA, 41 nt, synthetic construct
  source 1..41: mol_type = other RNA
gggtcttattccccggaggccatgtgggccatgaggtccac

SEQ ID NO: 570 - RNA, 41 nt, synthetic construct
  source 1..41: mol_type = other RNA
gggtctctctccttggaggctatgtgggccatgaggtccac

SEQ ID NO: 571 - RNA, 41 nt, synthetic construct
  source 1..41: mol_type = other RNA
gggccttactccttgaaggccatgtgggccatgaggtccac

SEQ ID NO: 572 - RNA, 45 nt, synthetic construct
  source 1..45: mol_type = other RNA
gggtttcactatacccttggaggtcatgtgggccatgaggtccac

SEQ ID NO: 573 - RNA, 41 nt, synthetic construct
  source 1..41: mol_type = other RNA
ggatcttagtccctgggggccatgtgggccatgaggtccac

SEQ ID NO: 574 - RNA, 43 nt, synthetic construct
  source 1..43: mol_type = other RNA
ggcaaaaaaactccttggaggctatgtgggccatgaggtccac

SEQ ID NO: 575 - RNA, 44 nt, synthetic construct
  source 1..44: mol_type = other RNA
ggctggtggtccaggggcaaaaaaactccttggaggccatgtgg

SEQ ID NO: 576 - RNA, 41 nt, synthetic construct
  source 1..41: mol_type = other RNA
ggggcttacttcttggcggccatgtgggccatgaggtccac

SEQ ID NO: 577 - RNA, 41 nt, synthetic construct
  source 1..41: mol_type = other RNA
tgtgctcttgctggggctggtaatccaggggtctcagtcag

SEQ ID NO: 578 - RNA, 41 nt, synthetic construct
  source 1..41: mol_type = other RNA
gggtctctttccttggaggcaatgtgggccatgaggtccac

SEQ ID NO: 579 - RNA, 41 nt, synthetic construct
  source 1..41: mol_type = other RNA
cagtcttagtcggtggagaccatgtgggccatgaggtccac

SEQ ID NO: 580 - RNA, 42 nt, synthetic construct
  source 1..42: mol_type = other RNA
gggtcttacctaactggaggccatgtgggccatgaggtccac

SEQ ID NO: 581 - RNA, 39 nt, synthetic construct
  source 1..39: mol_type = other RNA
ggtccttacttctgaggccatgtgggccatgaggtccac

SEQ ID NO: 582 - RNA, 42 nt, synthetic construct
  source 1..42: mol_type = other RNA
ggctggtggtctaggagtcctcctaccttggcggccatgtgg

SEQ ID NO: 583 - RNA, 41 nt, synthetic construct
  source 1..41: mol_type = other RNA
caatttcactcttcggagctcatgtgggccatgaggtccac

SEQ ID NO: 584 - RNA, 45 nt, synthetic construct
  source 1..45: mol_type = other RNA
tgtgctcttgctggggctggtgggccattcgtctcttttctcctt

SEQ ID NO: 585 - RNA, 48 nt, synthetic construct
  source 1..48: mol_type = other RNA
ggggctcacttcttggtgacaccacggcatgtgggccatgaggtccac

SEQ ID NO: 586 - RNA, 42 nt, synthetic construct
  source 1..42: mol_type = other RNA
ggctggtggtccaggggtcaccactttttaaaggccatgtgg

SEQ ID NO: 587 - RNA, 41 nt, synthetic construct
  source 1..41: mol_type = other RNA
gggtctcaatccttggaggccatgtgggccatgaggtccac

SEQ ID NO: 588 - RNA, 41 nt, synthetic construct
  source 1..41: mol_type = other RNA
gggcctcactccttggaggccatgtgggccatgaggtccac

SEQ ID NO: 589 - RNA, 41 nt, synthetic construct
  source 1..41: mol_type = other RNA
ggctggtggtccagggctctcgctccttggcggccatgtgg

SEQ ID NO: 590 - RNA, 41 nt, synthetic construct
  source 1..41: mol_type = other RNA
gggtcctactccttaccggccatgtgggccatgaggtccac

SEQ ID NO: 591 - RNA, 41 nt, synthetic construct
  source 1..41: mol_type = other RNA
ggctggtggttcaggggtctcgctccttagaggccatgtgg

SEQ ID NO: 592 - RNA, 50 nt, synthetic construct
  source 1..50: mol_type = other RNA
ggctggtggttcaggggtctcaaaaaaaaaactccttggaggccatgtgg

SEQ ID NO: 593 - RNA, 41 nt, synthetic construct
  source 1..41: mol_type = other RNA
gggtctcacgcctaggagcccatgtgggccatgaggtccac

SEQ ID NO: 594 - RNA, 41 nt, synthetic construct
  source 1..41: mol_type = other RNA
ggttcttactcacccgaggccatgtgggccatgaggtccac

SEQ ID NO: 595 - RNA, 41 nt, synthetic construct
  source 1..41: mol_type = other RNA
gggtctcattccttggaggccatgtgggccatgaggtccac

SEQ ID NO: 596 - RNA, 41 nt, synthetic construct
  source 1..41: mol_type = other RNA
ggctctcgctccttggcagccatgtgggccatgaggtccac

SEQ ID NO: 597 - RNA, 41 nt, synthetic construct
  source 1..41: mol_type = other RNA
gggtcctgctccttggaaatcatgtgggccatgaggtccac

SEQ ID NO: 598 - RNA, 42 nt, synthetic construct
  source 1..42: mol_type = other RNA
gggtcaccactttttaaaggccatgtgggccatgaggtccac

SEQ ID NO: 599 - RNA, 41 nt, synthetic construct
  source 1..41: mol_type = other RNA
gggtcttactttctggaggccatgtgggccatgaggtccac

SEQ ID NO: 600 - RNA, 41 nt, synthetic construct
  source 1..41: mol_type = other RNA
ggctggtggtttaagggtctcattccttggaggccatgtgg

SEQ ID NO: 601 - RNA, 41 nt, synthetic construct
  source 1..41: mol_type = other RNA
gggtcttactccctggaggccatgtgggccatgaggtccac

SEQ ID NO: 602 - RNA, 41 nt, synthetic construct
  source 1..41: mol_type = other RNA
ggctggtggtccagggatcttagtccctgggggccatgtgg

SEQ ID NO: 603 - RNA, 41 nt, synthetic construct
  source 1..41: mol_type = other RNA
gggtcttactccgtggaggcgatgtgggccatgaggtccac

SEQ ID NO: 604 - RNA, 41 nt, synthetic construct
  source 1..41: mol_type = other RNA
ggctggtggtcccggagtcttgcttcttggaggccatgtgg

SEQ ID NO: 605 - RNA, 40 nt, synthetic construct
  source 1..40: mol_type = other RNA
ggctggtggtccgttggcccaactcctcgaggccatgtgg

SEQ ID NO: 606 - RNA, 42 nt, synthetic construct
  source 1..42: mol_type = other RNA
gggtctcacctccttggaggccatgtgggccatgaggtccac

SEQ ID NO: 607 - RNA, 41 nt, synthetic construct
  source 1..41: mol_type = other RNA
ggctcttgctccttggcagccatgtgggccatgaggtccac

SEQ ID NO: 608 - RNA, 41 nt, synthetic construct
  source 1..41: mol_type = other RNA
ggggactacttcttggtggtgatgtgggccatgaggtccac

SEQ ID NO: 609 - RNA, 41 nt, synthetic construct
  source 1..41: mol_type = other RNA
tggcccaactcctcgatttccatgtgggccatgaggtccac

SEQ ID NO: 610 - RNA, 41 nt, synthetic construct
  source 1..41: mol_type = other RNA
gggtcttactcgtccccggccatgtgggccatgaggtccac

SEQ ID NO: 611 - RNA, 41 nt, synthetic construct
  source 1..41: mol_type = other RNA
aggtactgctcctcgcaggccatgtgggccatgaggtccac

SEQ ID NO: 612 - RNA, 41 nt, synthetic construct
  source 1..41: mol_type = other RNA
aggtaccgctcctcgcaggccatgtgggccatgaggtccac

SEQ ID NO: 613 - RNA, 41 nt, synthetic construct
  source 1..41: mol_type = other RNA
cagtctcagtcggtggagaccatgtgggccatgaggtccac

SEQ ID NO: 614 - RNA, 47 nt, synthetic construct
  source 1..47: mol_type = other RNA
tcgtctcttttctcctttgaatggcacatgtgggccatgaggtccac

SEQ ID NO: 615 - RNA, 41 nt, synthetic construct
  source 1..41: mol_type = other RNA
tggccccactcctcgatatccatgtgggccatgaggtccac

SEQ ID NO: 616 - RNA, 41 nt, synthetic construct
  source 1..41: mol_type = other RNA
gagtcctcctaccttggcggcatgtgggccatgaggtccac

SEQ ID NO: 617 - RNA, 41 nt, synthetic construct
  source 1..41: mol_type = other RNA
gggtcccgctccttggaaatcatgtgggccatgaggtccac

SEQ ID NO: 618 - RNA, 40 nt, synthetic construct
  source 1..40: mol_type = other RNA
tgtgctcttgctggggctggggtctaggggtctcgctcat

SEQ ID NO: 619 - RNA, 41 nt, synthetic construct
  source 1..41: mol_type = other RNA
ggtccccactacttggaggacatgtgggccatgaggtccac

SEQ ID NO: 620 - RNA, 41 nt, synthetic construct
  source 1..41: mol_type = other RNA
tggtttcaacacttgaaggacatgtgggccatgaggtccac

SEQ ID NO: 621 - RNA, 41 nt, synthetic construct
  source 1..41: mol_type = other RNA
gggtctcattccccggaggccatgtgggccatgaggtccac

SEQ ID NO: 622 - RNA, 41 nt, synthetic construct
  source 1..41: mol_type = other RNA
gggtcttactaattggcggcgatgtgggccatgaggtccac

SEQ ID NO: 623 - RNA, 41 nt, synthetic construct
  source 1..41: mol_type = other RNA
gggtcttacttcttaggacgcatgtgggccatgaggtccac

SEQ ID NO: 624 - RNA, 46 nt, synthetic construct
  source 1..46: mol_type = other RNA
ggtctcaaaaattccttggacaggccatgtgggccatgaggtccac

SEQ ID NO: 625 - RNA, 45 nt, synthetic construct
  source 1..45: mol_type = other RNA
gggtttaactatacccttggaggtcatgtgggccatgaggtccac

SEQ ID NO: 626 - RNA, 41 nt, synthetic construct
  source 1..41: mol_type = other RNA
gagtccccctaccttggcggcatgtgggccatgaggtccac

SEQ ID NO: 627 - RNA, 43 nt, synthetic construct
  source 1..43: mol_type = other RNA
aggtctcacagtccttggaggaaatgtgggccatgaggtccac

SEQ ID NO: 628 - RNA, 41 nt, synthetic construct
  source 1..41: mol_type = other RNA
tgtgctcttgctggggctggtagtccagcagtctcagtcgg

SEQ ID NO: 629 - RNA, 41 nt, synthetic construct
  source 1..41: mol_type = other RNA
ggctggtggtcccaggggaccacttcttggtggccatgtgg

SEQ ID NO: 630 - RNA, 43 nt, synthetic construct
  source 1..43: mol_type = other RNA
ggcaaacaaactccttggaggctatgtgggccatgaggtccac

SEQ ID NO: 631 - RNA, 37 nt, synthetic construct
  source 1..37: mol_type = other RNA
ggctggtggtgggtctcactccttggaggccatgtgg

SEQ ID NO: 632 - RNA, 40 nt, synthetic construct
  source 1..40: mol_type = other RNA
gagtctcctccttggaggcaatgtgggccatgaggtccac

SEQ ID NO: 633 - RNA, 41 nt, synthetic construct
  source 1..41: mol_type = other RNA
tgtgctcttgctggggctggcggtccggaggtaccgctcct

SEQ ID NO: 634 - RNA, 41 nt, synthetic construct
  source 1..41: mol_type = other RNA
tgtgctcttgctggggctggtagtccagcagtcttagtcgg

SEQ ID NO: 635 - RNA, 43 nt, synthetic construct
  source 1..43: mol_type = other RNA
gggtaccactcttttgtaaggccatgtgggccatgaggtccac

SEQ ID NO: 636 - RNA, 41 nt, synthetic construct
  source 1..41: mol_type = other RNA
ggctggtggtcccaggggactacttcttggtggccatgtgg

SEQ ID NO: 637 - RNA, 46 nt, synthetic construct
  source 1..46: mol_type = other RNA
gggccttactcgttggtgggttagctatgtgggccatgaggtccac

SEQ ID NO: 638 - RNA, 45 nt, synthetic construct
  source 1..45: mol_type = other RNA
ggctggtggtccattcgtcttttttctcctttgaaggccatgtgg

SEQ ID NO: 639 - RNA, 47 nt, synthetic construct
  source 1..47: mol_type = other RNA
cagtctcactcctacctcctggaacaaatgtgggccatgaggtccac

SEQ ID NO: 640 - RNA, 48 nt, synthetic construct
  source 1..48: mol_type = other RNA
ggggcttacttcttggtgacaccacggcatgtgggccatgaggtccac

SEQ ID NO: 641 - RNA, 41 nt, synthetic construct
  source 1..41: mol_type = other RNA
gggttacactcctaggaggcgatgtgggccatgaggtccac

SEQ ID NO: 642 - RNA, 41 nt, synthetic construct
  source 1..41: mol_type = other RNA
cggtcttactacccggaagccatgtgggccatgaggtccac

SEQ ID NO: 643 - RNA, 45 nt, synthetic construct
  source 1..45: mol_type = other RNA
ggctggtggtccaggtctcaaaaattccttggacaggccatgtgg

SEQ ID NO: 644 - RNA, 42 nt, synthetic construct
  source 1..42: mol_type = other RNA
ggctggtggtctaggagtccccctaccttggcggccatgtgg

SEQ ID NO: 645 - RNA, 41 nt, synthetic construct
  source 1..41: mol_type = other RNA
tgtgctcttgctggggctgggggtccaggggtcctgctcct

SEQ ID NO: 646 - RNA, 41 nt, synthetic construct
  source 1..41: mol_type = other RNA
gggtatctctcctcggagcccatgtgggccatgaggtccac

SEQ ID NO: 647 - RNA, 41 nt, synthetic construct
  source 1..41: mol_type = other RNA
gggtctcgctcctttgaggacatgtgggccatgaggtccac

SEQ ID NO: 648 - RNA, 41 nt, synthetic construct
  source 1..41: mol_type = other RNA
tgtgctcttgctggggctggcggtccggaggtactgctcct

SEQ ID NO: 649 - RNA, 41 nt, synthetic construct
  source 1..41: mol_type = other RNA
gggtcttgctccttggaggccatgtgggccatgaggtccac

SEQ ID NO: 650 - RNA, 47 nt, synthetic construct
  source 1..47: mol_type = other RNA
tgtgctcttgctggggctggtatagtcccaggggcaaaaaaactcct

SEQ ID NO: 651 - RNA, 45 nt, synthetic construct
  source 1..45: mol_type = other RNA
tgtgctcttgctggggctggtgggccattcgtcttttttctcctt

SEQ ID NO: 652 - RNA, 43 nt, synthetic construct
  source 1..43: mol_type = other RNA
aggtcttacagtccttggaggaaatgtgggccatgaggtccac

SEQ ID NO: 653 - RNA, 41 nt, synthetic construct
  source 1..41: mol_type = other RNA
gggtctcagtcagtggaggccatgtgggccatgaggtccac

SEQ ID NO: 654 - RNA, 41 nt, synthetic construct
  source 1..41: mol_type = other RNA
ggctggtggtccggaggtactgctcctcgcaggccatgtgg

SEQ ID NO: 655 - RNA, 47 nt, synthetic construct
  source 1..47: mol_type = other RNA
tcgtcttttttctcctttgaatggcacatgtgggccatgaggtccac

SEQ ID NO: 656 - RNA, 41 nt, synthetic construct
  source 1..41: mol_type = other RNA
tgtgctcttgctggggctgggggtccaggggtcccgctcct

SEQ ID NO: 657 - RNA, 41 nt, synthetic construct
  source 1..41: mol_type = other RNA
ggctggtggtccggaggtaccgctcctcgcaggccatgtgg

SEQ ID NO: 658 - RNA, 45 nt, synthetic construct
  source 1..45: mol_type = other RNA
ggctggtggtccattcgtctcttttctcctttgaaggccatgtgg

SEQ ID NO: 659 - RNA, 41 nt, synthetic construct
  source 1..41: mol_type = other RNA
gggtaccactccttggaggccatgtgggccatgaggtccac

SEQ ID NO: 660 - RNA, 41 nt, synthetic construct
  source 1..41: mol_type = other RNA
ggctggtggtccaggggtccctgagtatggaggccatgtgg

SEQ ID NO: 661 - RNA, 151 nt, synthetic construct
  source 1..151: mol_type = other RNA
tggcagggactccccagcagtgagggtctctctcttcctcttgtgctcttgctggggctggtggtccaggggtctcactccgtggaagccatataggccatgaggtccaccaccctgttgctgtagccaaattcgttgtcataccaggaaa

SEQ ID NO: 662 - RNA, 151 nt, synthetic construct
  source 1..151: mol_type = other RNA
tggcagggactccccagcagtgagggtctctctcttcctcttgtgctcgggttggggctggtggtccaggggtctcactccttggaggccatgtgggcaatgaggtccaccaccctgttgctgtagccaaattcgttgtcataccaggaaa

SEQ ID NO: 663 - RNA, 150 nt, synthetic construct
  source 1..150: mol_type = other RNA
tggcagggactccccagcagtgagggtctcttcttcttaaacgtgtgatcttgctggggcttgtggtccaggggtctcactcctgggaggccatatgggccatgaggtccaccaccctgttgctgtagccaaattcgttgtcataccagg

SEQ ID NO: 664 - RNA, 150 nt, synthetic construct
  source 1..150: mol_type = other RNA
tggcagggactccccagcagtgagggtctctctcttcctagtatgtgtttcttgctggggctggtggtccatgggtctcactcattggaggccatgtggtacatgaggtccaccaccctgttgctgtagccaaattcgttgtcataccag

SEQ ID NO: 665 - RNA, 144 nt, synthetic construct
  source 1..144: mol_type = other RNA
tggcagggactccccagcagtgagggtctctctcttcctcttgtgctctggttggggctggtggtccaggggtctcactcattggaggggccatgaggtccaccaccctgttgctgtagccaaattcgttgtcataccaggaaa

SEQ ID NO: 666 - RNA, 150 nt, synthetic construct
  source 1..150: mol_type = other RNA
tggcagggactccccagcagtgagggtctctctcgtccatacatgttctcttgctggggctgggggtccagtggtcttactcctgggaggccagggaggttatgaggtccaccaccctgttgctgtagccaaattcgttgtcataccagg

SEQ ID NO: 667 - RNA, 151 nt, synthetic construct
  source 1..151: mol_type = other RNA
tggcagggactccccagcagtgagggtctctctcttcctcttgtgctcttgctggggcgggtggtccaggggtctcactccttggaagccatataggccatgaggtccaccaccctgttgctgtagccaaattcgttgtcataccaggaaa

SEQ ID NO: 668 - RNA, 150 nt, synthetic construct
  source 1..150: mol_type = other RNA
tggcagggactccccagcagtgagggtctctctcttcctcttgtgatcttgctggggctggtggtccaggagtctcacttcttggaggccatgtaccaggggccatgaggtccaccaccctgttgctgtagccaaattcgttgtcatacc

SEQ ID NO: 669 - RNA, 150 nt, synthetic construct
  source 1..150: mol_type = other RNA
tggcagggactccccagcagtgagggtctctctcttccgtttaaatgctctggctggggctggtggtccagggggctcactcctgggaggccataggggcaatgaggtccaccaccctgttgctgtagccaaattcgttgtcataccagg

SEQ ID NO: 670 - RNA, 151 nt, synthetic construct
  source 1..151: mol_type = other RNA
tggcagggactccccagcagtgagggtctctcgcttcctcgtgggctcttgatggggcgggtggtccaggggtctcactccttggaagccatataggttatgaggtccaccaccctgttgctgtagccaaattcgttgtcataccaggaaa

SEQ ID NO: 671 - RNA, 151 nt, synthetic construct
  source 1..151: mol_type = other RNA
tggcagggactccccagcagtgagggtctctctcttcctcttgtgctcttgctggggctgttggtccatgggtctcactccttggaggccatgtgggccatgaggtccaccaccctgttgctgtagccaaattcgttgtcataccaggaaa

SEQ ID NO: 672 - RNA, 151 nt, synthetic construct
  source 1..151: mol_type = other RNA
tggcagggactccccagcagtgagggtctctctcttcctcttgtgctcttgctggggctggtggttcaggggtctcactctgatgaggccatgtgggccatgaggtccaccaccctgttgctgtagccaaattcgttgtcataccaggaaa

SEQ ID NO: 673 - RNA, 150 nt, synthetic construct
  source 1..150: mol_type = other RNA
tggcagggactccccagcagtgagggtctctctcttcctcttgtgctcttgctgggtttaggtggtgcaggggtctcactccttgtaggaaatgtgggccatgaggtccaccaccctgttgctgtagccaaattcgttgtcataccagga

SEQ ID NO: 674 - RNA, 151 nt, synthetic construct
  source 1..151: mol_type = other RNA
tggcagggactccccagcagtgagggtctctctcttcctcttgtgctcttgctggggctgttggttcagggttcttactcagatgaggccatatgggccatgaggtccaccaccctgttgctgtagccaaattcgttgtcataccaggaaa

SEQ ID NO: 675 - RNA, 150 nt, synthetic construct
  source 1..150: mol_type = other RNA
tggcagggactccccagcagtgagggtctctctcttcctcttgtgctcttgctgaggctggtggtccaggggtctcactccttggaggccagaggggttaatgaggtccaccaccctgttgctgtagccaaattcgttgtcataccagga

SEQ ID NO: 676 - RNA, 151 nt, synthetic construct
  source 1..151: mol_type = other RNA
tggcagggactccccagcagtgagggtctctctcttcctcttgtgatcgggctggggcgggtggtccaggggtctcacttcttggaggccatgtgggccatgaggtccaccaccctgttgctgtagccaaattcgttgtcataccaggaaa

SEQ ID NO: 677 - RNA, 150 nt, synthetic construct
  source 1..150: mol_type = other RNA
tggcagggactccccagcagtgagggtctctctcttcctcttgtgctcttgctggggctggtggtccaggagtctcacttcttggaggccatgtaccaggggccatgaggtccaccaccctgttgctgtagccaaattcgttgtcatacc

SEQ ID NO: 678 - RNA, 151 nt, synthetic construct
  source 1..151: mol_type = other RNA
tggcagggactccccagcagtgagggtctctctcttcctcttgtgctcttgctggggagggtggtacagggatctcactcctttgaggacatgtgggccatgaggtccaccaccctgttgctgtagccaaattcgttgtcataccaggaaa

SEQ ID NO: 679 - RNA, 151 nt, synthetic construct
  source 1..151: mol_type = other RNA
tggcagggactccccagcagtgagggtctctctcttcctcttgtgctcttgctggggctggtggtccagggggctcactcctgggaggccataggggccatgaggtccaccaccctgttgctgtagccaaattcgttgtcataccaggaaa

SEQ ID NO: 680 - RNA, 151 nt, synthetic construct
  source 1..151: mol_type = other RNA
tggcagggactccccagcagtgagggtctctctcttcctctggggctcttgctggggctgttggtctaggggtctcactcattgtaggccatgtgggctgtgagttacaccaccctgttgctgtagccaaattcgttgtcataccaggaaa

SEQ ID NO: 681 - RNA, 151 nt, synthetic construct
  source 1..151: mol_type = other RNA
tggcagggactccccagcagtgagggtctctttcttcaacaatgcatcttgctggggctggtggtccagggtacttactccttggaggccatttgggcaatgaggtccaccaccctgttgctgtagccaaattcgttgtcataccaggaaa

SEQ ID NO: 682 - RNA, 150 nt, synthetic construct
  source 1..150: mol_type = other RNA
tggcagggactccccagcagtgagggtctctctcttcctcttgtgatctggctggggctggtggtccctgggtctcactccttggaggccagttgggaagctatgaggtccaccaccctgttgctgtagccaaattcgttgtcataccag

SEQ ID NO: 683 - RNA, 150 nt, synthetic construct
  source 1..150: mol_type = other RNA
tggcagggactccccagcagtgagggtctctctcttcatcttggcctcttgctggggctggtggtacagggttctcactccttggaggccatttgcggccatgaggtccaccaccctgttgctgtagccaaattcgttgtcataccagga

SEQ ID NO: 684 - RNA, 151 nt, synthetic construct
  source 1..151: mol_type = other RNA
tggcagggactccccagcagtgagggtctctctcttcctcttgtgctcttgctggggctggtggtcaagggggctcactctttcaaggccatgtaggccatgaggtccaccaccctgttgctgtagccaaattcgttgtcataccaggaaa

SEQ ID NO: 685 - RNA, 150 nt, synthetic construct
  source 1..150: mol_type = other RNA
tggcagggactccccagcagtgagggtctctctcttcctcttgtgattcttggtggggctggtggtccctgggtctcactccttggaggccatgtgggccgtgaggtccaccaccctgttgctgtagccaaattcgttgtcataccagga

SEQ ID NO: 686 - RNA, 149 nt, synthetic construct
  source 1..149: mol_type = other RNA
tggcagggactccccagcagtgagggtctctctctttattgttctcttgctggggctggtggtccagggatctcactccttggaggccatgtgggccaggaggtccaccaccctgttgctgtagccaaattcgttgtcataccaggaaa

SEQ ID NO: 687 - RNA, 150 nt, synthetic construct
  source 1..150: mol_type = other RNA
tggcagggactccccagcagtgagggtctctctcttcctcttgtgctccttgttggggctggtggtccacgggtctcactcctttgagtccatgtgggccaggacatccaccaccctgttgctgtagccaaattcgttgtcataccagga

SEQ ID NO: 688 - RNA, 151 nt, synthetic construct
  source 1..151: mol_type = other RNA
tggcagggactccccagcagtgagggtctctctcttcctcttgtgctcttgctggggcttgtgatccaggggtctcactctttggacgccatgtgggccattcggtccaccaccctgttgctgtagccaaattcgttgtcataccaggaaa

SEQ ID NO: 689 - RNA, 151 nt, synthetic construct
  source 1..151: mol_type = other RNA
tggcagggactccccagcagtgagggtctcgctcttcctagtgttatcttgctggggctggtggtccaggggtctcactccgtggaagccatataggttaggaggtccaccaccctgttgctgtagccaaattcgttgtcataccaggaaa

SEQ ID NO: 690 - RNA, 151 nt, synthetic construct
  source 1..151: mol_type = other RNA
tggcagggactccccagcagtgagggtctctctcttcctcttgtgctcttgctggggctggtggtccaggggtctcactcagtggaggccatgtgggccatgaggtccaccaccctgttgctgtagccaaattcgttgtcataccaggaaa

SEQ ID NO: 691 - RNA, 150 nt, synthetic construct
  source 1..150: mol_type = other RNA
tggcagggactccccagcagtgagggtctctctcttcctcttgtgctcttgctggagctggtggtccaggggtctcacctacgtggaggccaggtgggccatgaggtccaccaccctgttgctgtagccaaattcgttgtcataccagga

SEQ ID NO: 692 - RNA, 151 nt, synthetic construct
  source 1..151: mol_type = other RNA
tggcagggactccccagcagtgagggtctctctcttcctcttgtgcttgtgctggggctggtggtccagtggtctcactacggggaagccatggaggccatgaggtccaccaccctgttgctgtagccaaattcgttgtcataccaggaaa

SEQ ID NO: 693 - RNA, 151 nt, synthetic construct
  source 1..151: mol_type = other RNA
tggcagggactccccagcagtgagggtctctctcttcctcttgtgctcttgctggggctggtggtccaggggtctcactagttggaggccatgtgggccatgaggtccaccaccctgttgctgtagccaaattcgttgtcataccaggaaa

SEQ ID NO: 694 - RNA, 150 nt, synthetic construct
  source 1..150: mol_type = other RNA
tggcagggactccccagcagtgagggtctctctctttcttgtgctcttgctggggctggtggtccaggggtcttactctttgaggccattgttggccacgtgatgaggtccaccaccctgttgctgtagccaaattcgttgtcataccag

SEQ ID NO: 695 - RNA, 150 nt, synthetic construct
  source 1..150: mol_type = other RNA
tggcagggactccccagcagtgagggtctcttgattcctcttgtgatcttgctggggctggtggtccaggagtctcacttcttggaggccatgtaccaggggccatgaggtccaccaccctgttgctgtagccaaattcgttgtcatacc

SEQ ID NO: 696 - RNA, 150 nt, synthetic construct
  source 1..150: mol_type = other RNA
tggcagggactccccagcagtgagggtctctctcttcctcttgtgctcttgctggggctggaggtcccggaggtctcactccttggccatggtgggccatgaggtccaccaccctgttgctgtagccaaattcgttgtcataccaggaaa

SEQ ID NO: 697 - RNA, 150 nt, synthetic construct
  source 1..150: mol_type = other RNA
tggcagggactccccagcagtgagggtctctctcttcctcttgtgtagccagcttgggctggtggtccaggagtctcactctttggaggccatgtgggccatgaggtccaccaccctgttgctgtagccaaattcgttgtcataccagga

SEQ ID NO: 698 - RNA, 151 nt, synthetic construct
  source 1..151: mol_type = other RNA
tggcagggactccccagcagtgagggtctctctcttcctcttgtgactgagcgggggctggtggtccaggggtcttactcagtggaggccatgtgggacatgaggtccaccaccctgttgctgtagccaaattcgttgtcataccaggaaa

SEQ ID NO: 699 - RNA, 151 nt, synthetic construct
  source 1..151: mol_type = other RNA
tggcagggactccccagcagtgagggtctctctcttcctcttgtgctcttgctggagctggtgttccgggggtctcactatttggaggccatgggggccatgaggtccaccaccctgttgctgtagccaaattcgttgtcataccaggaaa

SEQ ID NO: 700 - RNA, 150 nt, synthetic construct
  source 1..150: mol_type = other RNA
tggcagggactccccagcagtgagggtctctctcttccttgttgctctggctggggctggtggtccagggttctcactccttcgaggccatgtgggccatgcgggccaccaccctggtgctgtagccaaattcgttgtcataccaggaaa

SEQ ID NO: 701 - RNA, 150 nt, synthetic construct
  source 1..150: mol_type = other RNA
tggcagggactccccagcagtgagggtctctctcttcctcttgtgctcttgctggcactggtggccaggggtctcactccttggaggccatgtgggccatgaggtccaccaccctgttgctgtagccaaattcgttgtcataccaggaaa

SEQ ID NO: 702 - RNA, 151 nt, synthetic construct
  source 1..151: mol_type = other RNA
tggcagggactccccagcagtgagggtctctctcttcctggcttgtgctcttgctggggctggtgtcagtggtctcactccttggaggccatgggggtcatgaggtccaccaccctgttgctgtagccaaattcgttgtcataccaggaaa

SEQ ID NO: 703 - RNA, 151 nt, synthetic construct
  source 1..151: mol_type = other RNA
tggcagggactccccagcagtgagggtctctctcttcctcttgtgatcttgctggggctggtggtccaggggtctcacttcttggaggccatgttggtaatgaggtccaccaccctgttgctgtagccaaattcgttgtcataccaggaaa

SEQ ID NO: 704 - RNA, 151 nt, synthetic construct
  source 1..151: mol_type = other RNA
tggcagggactccccagcagtgagggtctctctcttcctcttgtgatcttgctggggctggtggtccagggtactcactccttggaggccatttgggcaatgaggtccaccaccctgttgctgtagccaaattcgttgtcataccaggaaa

SEQ ID NO: 705 - RNA, 146 nt, synthetic construct
  source 1..146: mol_type = other RNA
tggcagggactccccagcagtgagggtctctctcttcctcttgtgagatgctggggctggtggtccagggtgctcacttctgcggccatggaggccatgagccaccaccctgttgctgtagccaaattcgttgtcataccaggaaa

SEQ ID NO: 706 - RNA, 151 nt, synthetic construct
  source 1..151: mol_type = other RNA
tggcagggactccccagcagtgagggtctctctcttcctcttgtgactgggctggggctgttggtccatgggtctcactccttggaggccatgtgggttatgaggtccaccaccctgttgctgtagccaaattcgttgtcataccaggaaa

SEQ ID NO: 707 - RNA, 150 nt, synthetic construct
  source 1..150: mol_type = other RNA
tggcagggactccccagcagtgagggtctctctcttcctcttgtgctcttgctgtggctggtggtccagtggtctcactccttggagtctcatgtgtgccatgaggtccaccaccctgttgctgtagccaaattcgttgtcataccagga

SEQ ID NO: 708 - RNA, 151 nt, synthetic construct
  source 1..151: mol_type = other RNA
tggcagggactccccagcagtgagggtctctcgcttcctcttgtgctcttgcgagtttaggtggtgcaggggtctcactccttgtaggaaatgtgggtcatgagttctaccgcccggttgctgtagccaaattcgttgtcataccaggaaa

SEQ ID NO: 709 - RNA, 151 nt, synthetic construct
  source 1..151: mol_type = other RNA
tggcagggactccccagcagtgagggtctctctcttcctcttgtgctcttgctggggctggtggtccaggggtctcactccttgaaggccatatgggccatgaggtccaccaccctgttgctgtagccaaattcgttgtcataccaggaaa

SEQ ID NO: 710 - RNA, 151 nt, synthetic construct
  source 1..151: mol_type = other RNA
tggcagggactccccagcagtgagggtctctctcttcctcttgtgctcttgctggggttggggggcccggggtctcactcctttccagccatgtgggccatgaggtccaccaccctgttgctgtagccaaattcgttgtcataccaggaaa

SEQ ID NO: 711 - RNA, 151 nt, synthetic construct
  source 1..151: mol_type = other RNA
tggcagggactccccagcagtgagggtctctctcttcctcttgtgttcgtgctggggctggtggtccagggctctcactccttggaggccatgggggccatgaggtccaccaccctgttgctgtagccaaattcgttgtcataccaggaaa

SEQ ID NO: 712 - RNA, 151 nt, synthetic construct
  source 1..151: mol_type = other RNA
tggcagggactccccagcagtgagggtctctctcttcttattgttatcgtgctggggctggtggtcaaggggtcttactccttggaggccatgtgggttatgaggtccaccaccctgttgctgtagccaaattcgttgtcataccaggaaa

SEQ ID NO: 713 - RNA, 151 nt, synthetic construct
  source 1..151: mol_type = other RNA
tggcagggactccccagcagtgagggtctctcgctttatattggcttcttgctggggctggtggtccagggttcttactccttggaggccagatggggcatgaggtccaccaccctgttgctgtagccaaattcgttgtcataccaggaaa

SEQ ID NO: 714 - RNA, 151 nt, synthetic construct
  source 1..151: mol_type = other RNA
tggcagggactccccagcagtgagggtctctctcttcatcttgtgctcgtgctgaggctggtggtccaggggtctcactccgtggaggccatgtggggcctgaggtccaccaccctgttgctgtagccaaattcgttgtcataccaggaaa

SEQ ID NO: 715 - RNA, 151 nt, synthetic construct
  source 1..151: mol_type = other RNA
tggcagggactccccagcagtgagggtctctcgttgactcttggcaccgggcttgggctggtggtccaggggtctcactcttgtcaggccatgtaggccatgaggtccaccaccctgttgctgtagccaaattcgttgtcataccaggaaa

SEQ ID NO: 716 - RNA, 151 nt, synthetic construct
  source 1..151: mol_type = other RNA
tggcagggactccccagcagtgagggtctctctcttcctcttgtgctcttgatggggcgggtggtccaggggtctcactccttggaagccatataggttatgaggtccaccaccctgttgctgtagccaaattcgttgtcataccaggaaa

SEQ ID NO: 717 - RNA, 150 nt, synthetic construct
  source 1..150: mol_type = other RNA
tggcagggactccccagcagtgagggtctctctcttcaaatcttgttctcttgctggggctggtggtccaggggtcttactccgtggaggccatggaggccatgaggtccaccaccctgttgctgtagccaaattcgttgtcataccagg

SEQ ID NO: 718 - RNA, 151 nt, synthetic construct
  source 1..151: mol_type = other RNA
tggcagggactccccagcagtgagggtctctctcttcctcttgtgctcttgctggggagggtgggccaagggtctcactccttggaggaacggtgggccatgaggtccaccaccctgttgctgtagccaaattcgttgtcataccaggaaa

SEQ ID NO: 719 - RNA, 151 nt, synthetic construct
  source 1..151: mol_type = other RNA
tggcagggactccccagcagtgagggtctctctcttcctcttgtgctcttgctggggctggtggtccaggggtctcactccgtggaggccatgtgggccatgaggtccaccaccctgttgctgtagccaaattcgttgtcataccaggaaa

SEQ ID NO: 720 - RNA, 150 nt, synthetic construct
  source 1..150: mol_type = other RNA
tggcagggactccccagcagtgagggtctctctctgcctagtatgtgatcttgctggggctggtggtccaggggtctcactcaggggagtccatgtgggttatgaggtccaccaccctgttgctgtagccaaattcgttgtcataccagg

SEQ ID NO: 721 - RNA, 151 nt, synthetic construct
  source 1..151: mol_type = other RNA
tggcagggactccccagcagtgagggtctctctcttcctcttgtgacttggctgcggctggtgatccagggggctcactccttggaggccatgtaggtcatgaggtccaccaccctgttgctgtagccaaattcgttgtcataccaggaaa

SEQ ID NO: 722 - RNA, 151 nt, synthetic construct
  source 1..151: mol_type = other RNA
tggcagggactccccagcagtgagggtctctctcttcctcttgtgctcttgctggggctggtggtcaaggggtctcactccttggaggccatgtgggccatgaggtccaccaccctgttgctgtagccaaattcgttgtcataccaggaaa

SEQ ID NO: 723 - RNA, 151 nt, synthetic construct
  source 1..151: mol_type = other RNA
tggcagggactccccagcagtgagggtctctctcttcctcttgtgctcttgctggggctggtggtcccgggatctcactccttggaggccatgtgggcaatgaggtccaccaccctgttgctgtagccaaattcgttgtcataccaggaaa

SEQ ID NO: 724 - RNA, 144 nt, synthetic construct
  source 1..144: mol_type = other RNA
tggcagggactccccagcagtgagggtctctctcttcctcttgtgctcttgctggggctggtggtccaggggtctcactcattggaggggccatgaggtccaccaccctgttgctgtagccaaattcgttgtcataccaggaaa

SEQ ID NO: 725 - RNA, 150 nt, synthetic construct
  source 1..150: mol_type = other RNA
tggcagggactccccagcagtgagggtctctctcttcctggcttgtgatatggttggggctggtggtccaggggtcttactcctgggaggccatgtaggccatgaggtccaccaccctgttgctgtagccaaattcgttgtcataccagg

SEQ ID NO: 726 - RNA, 151 nt, synthetic construct
  source 1..151: mol_type = other RNA
tggcagggactccccagcagtgagggtctctctcttctgccagggctcttgctggggcttgtgatccaggggtctcactctttggacgccatgtgggccattcggtccaacaccctgttgctgtagccaaattcgttgtcataccaggaaa

SEQ ID NO: 727 - RNA, 151 nt, synthetic construct
  source 1..151: mol_type = other RNA
tggcagggactccccagcagtgagggtctctctcttcctcttgtgctcttgctggggctggtggtccaggagtctcactctttggaggccatgtgggccatgaggtccaccaccctgttgctgtagccaaattcgttgtcataccaggaaa

SEQ ID NO: 728 - RNA, 151 nt, synthetic construct
  source 1..151: mol_type = other RNA
tggcagggactccccagcagtgagggtctctctcttcctcttgtgctcttgctggggctggtggtccagggtactcactccttggaggccatttgggccatgaggtccaccaccctgttgctgtagccaaattcgttgtcataccaggaaa

SEQ ID NO: 729 - RNA, 151 nt, synthetic construct
  source 1..151: mol_type = other RNA
tggcagggactccccagcagtgagggtctctctcttcctcttgtgctcttgctggggctggtgggtcaggggtctcactttgtggaggccagatgggccatgaggtccaccaccctgttgctgtagccaaattcgttgtcataccaggaaa

SEQ ID NO: 730 - RNA, 150 nt, synthetic construct
  source 1..150: mol_type = other RNA
tggcagggactccccagcagtgagggtctctctcttcctcttgtgctattgctggggctggtgatccgtggttctcactccttcctcgaggctatgtgagccatgcgggccaccaccctgttgctgtagccaaattcgttgtcataccag

SEQ ID NO: 731 - RNA, 151 nt, synthetic construct
  source 1..151: mol_type = other RNA
tggcagggactccccagcagtgagggtctctctcttcctcttgtgctcttgctggggctggtgggaaaggggtctcactcctttggggccatgtgggccatgaggtccaccaccctgttgctgtagccaaattcgttgtcataccaggaaa

SEQ ID NO: 732 - RNA, 150 nt, synthetic construct
  source 1..150: mol_type = other RNA
tggcagggactccccagcagtgagggtctctctcttcctcttgtgctcttgctgggcggctggtggtcaaggggtctcactccttgtagaccatgtgggccatgaggtccaccaccctgttgctgtagccaaattcgttgtcataccagg

SEQ ID NO: 733 - RNA, 151 nt, synthetic construct
  source 1..151: mol_type = other RNA
tggcagggactccccagcagtgagggtctctctcttcctcttgtgctcgtgctgaggctggtggtccaggggtctcactccgtggaggccatgtggggcctgaggtccaccaccctgttgctgtagccaaattcgttgtcataccaggaaa

SEQ ID NO: 734 - RNA, 150 nt, synthetic construct
  source 1..150: mol_type = other RNA
tggcagggactccccagcagtgagggtctctctctttcttgggctcttgatggggctggtggtccaggggtcttactccttgaaggccatatggcgctatgaggtccaccaccctgttgctgtagccaaattcgttgtcataccaggaaa

SEQ ID NO: 735 - RNA, 151 nt, synthetic construct
  source 1..151: mol_type = other RNA
tggcagggactccccagcagtgagggtctctctcttcctcttgtgctcttgctggggctggtggtccagggctctcactccttggaggccatgggggccatgaggtccaccaccctgttgctgtagccaaattcgttgtcataccaggaaa

SEQ ID NO: 736 - RNA, 150 nt, synthetic construct
  source 1..150: mol_type = other RNA
tggcagggactccccagcagtgagggtctctcgattcctcttgtgctcttgctgtggatggtggtccaggtgtctcactccttggaggacatgtgggccatgagttcaacctcctgttgctgtagccaaattcgttgtcataccaggaaa

SEQ ID NO: 737 - RNA, 150 nt, synthetic construct
  source 1..150: mol_type = other RNA
tggcagggactccccagcagtgagggtctctctcttcctaatgcatctggctgaggctggtggtccaggggtcttactccttggaggccagaggtgctatgaggtccaccaccctgttgctgtagccaaattcgttgtcataccaggaaa

SEQ ID NO: 738 - RNA, 151 nt, synthetic construct
  source 1..151: mol_type = other RNA
tggcagggactccccagcagtgagggtctctctcttcctcttgtgctcttgctgggtctgggggtccaggggtcgtactccttggagttcatgtttgccatgaggtccaccaccctgttgctgtagccaaattcgttgtcataccaggaaa

SEQ ID NO: 739 - RNA, 151 nt, synthetic construct
  source 1..151: mol_type = other RNA
tggcagggactccccagcagtgagggtctctctcttcctcgttggctcttgctggggctggtggttcaggggttgcactccttggaggccatgaccaccatgatgtccaccaccctgttgctgtagccaaattcgttgtcataccaggaaa

SEQ ID NO: 740 - RNA, 151 nt, synthetic construct
  source 1..151: mol_type = other RNA
tggcagggactccccagcagtgagggtctctctcttcctcttgtgatcttgctggggcttgtggtccaggggtctcactcctgggaggccatatgggccatgaggtccaccaccctgttgctgtagccaaattcgttgtcataccaggaaa

SEQ ID NO: 741 - RNA, 151 nt, synthetic construct
  source 1..151: mol_type = other RNA
tggcagggactccccagcagtgagggtctctctcttcctcttgtgctcttgctggggctggtggttcagggggctcactccttggcagccatgtgggccatgaggtccaccaccctgttgctgtagccaaattcgttgtcataccaggaaa

SEQ ID NO: 742 - RNA, 149 nt, synthetic construct
  source 1..149: mol_type = other RNA
tggcagggactccccagcagtgagggtctctctcttcctcttgtgctcttgctggggctggtggtccatgggtctcactccttggaggccggtggccatgaggtccaccaccctgttgctgtagccaaattcgttgtcataccaggaaa

SEQ ID NO: 743 - RNA, 151 nt, synthetic construct
  source 1..151: mol_type = other RNA
tggcagggactccccagcagtgagggtctctacttcctgcttgtgatcgggctgaggcttgtggtccaggggtctcactccttggaggccatgggggctatgaggtccaccaccctgttgctgtagccaaattcgttgtcataccaggaaa

SEQ ID NO: 744 - RNA, 150 nt, synthetic construct
  source 1..150: mol_type = other RNA
tggcagggactccccagcagtgagggtctctctcttcctcttgtgctcttgctggggctggtggttaaggtatctcactccttggcggcaggggggccatgaggtccaccaccctgttgctgtagccaaattcgttgtcataccaggaaa

SEQ ID NO: 745 - RNA, 151 nt, synthetic construct
  source 1..151: mol_type = other RNA
tggcagggactccccagcagtgagggtctctttcttcaacaatgcatcttgctggggctggtggtccagggtactcactccttggaggccatttgggcaatgaggtccaccaccctgttgctgtagccaaattcgttgtcataccaggaaa

SEQ ID NO: 746 - RNA, 151 nt, synthetic construct
  source 1..151: mol_type = other RNA
tggcagggactccccagcagtgagggtctctctcttcctcttgtgctcttgctggggctggtggtccatgggtctcactcattggaggccatgtgggccatgaggtccaccaccctgttgctgtagccaaattcgttgtcataccaggaaa

SEQ ID NO: 747 - RNA, 151 nt, synthetic construct
  source 1..151: mol_type = other RNA
tggcagggactccccagcagtgagggtctctctcttcctcttgtgatctggctggggctggtggtccatgggtctcactccgtggaggcaatgtgggctatgaggtccaccaccctgttgctgtagccaaattcgttgtcataccaggaaa

SEQ ID NO: 748 - RNA, 151 nt, synthetic construct
  source 1..151: mol_type = other RNA
tggcagggactccccagcagtgagggtctctttcttcaacaattgctcttgctggtgctgtcttgttgggggtctcacttcttggaggccctgtgggccatgaggtcaaccaccctgttgctgtagccaaattcgttgtcataccaggaaa

SEQ ID NO: 749 - RNA, 150 nt, synthetic construct
  source 1..150: mol_type = other RNA
tggcagggactccccagcagtgagggtctctctctttcttgggctcttgatggggctggtggtccaggggtctcactccttgaaggccatatggcgctatgaggtccaccaccctgttgctgtagccaaattcgttgtcataccaggaaa

SEQ ID NO: 750 - RNA, 151 nt, synthetic construct
  source 1..151: mol_type = other RNA
tggcagggactccccagcagtgagggtctctcgctttatattggcttcttgctggggctggtggtccagggttctcactccttggaggccagatggggcatgaggtccaccaccctgttgctgtagccaaattcgttgtcataccaggaaa

SEQ ID NO: 751 - RNA, 151 nt, synthetic construct
  source 1..151: mol_type = other RNA
tggcagggactccccagcagtgagggtctctctcttcttattgttatcgtgctggggctggtggtcaaggggtctcactccttggaggccatgtgggttatgaggtccaccaccctgttgctgtagccaaattcgttgtcataccaggaaa

SEQ ID NO: 752 - RNA, 151 nt, synthetic construct
  source 1..151: mol_type = other RNA
tggcagggactccccagcagtgagggtctctctcttcctcttgtgctcttgctggggctggtggtccctgggtctcactccttggaggccagttgggccatgaggtccaccaccctgttgctgtagccaaattcgttgtcataccaggaaa

SEQ ID NO: 753 - RNA, 151 nt, synthetic construct
  source 1..151: mol_type = other RNA
tggcagggactccccagcagtgagggtctctctcttcctcttgtgctcttgctggggctggtggtccaggggtcttactccgtggaggccaggtaggccatgaggtccaccaccctgttgctgtagccaaattcgttgtcataccaggaaa

SEQ ID NO: 754 - RNA, 150 nt, synthetic construct
  source 1..150: mol_type = other RNA
tggcagggactccccagcagtgagggtctctcttcctcttggccctcttgctggggcgggtggtccgggggtctcactccttctagtacatgtgggccatgaggtccaacaccctgttgctgtagccaaattcgttgtcataccaggaaa

SEQ ID NO: 755 - RNA, 149 nt, synthetic construct
  source 1..149: mol_type = other RNA
tggcagggactccccagcagtgagggtctctcttaatcttgtgatcgggctggggcgggtggtccaggggtctcacttcttggaggccatgtgggccatgaggtccaccaccctgttgctgtagccaaattcgttgtcataccaggaaa

SEQ ID NO: 756 - RNA, 150 nt, synthetic construct
  source 1..150: mol_type = other RNA
tggcagggactccccagcagtgagggtctctctcttccatacttgttactgagcgggggctggtggtccaggggtctcactcagtggaggccatgtgggacatgaggtccaccaccctgttgctgtagccaaattcgttgtcataccagg

SEQ ID NO: 757 - RNA, 151 nt, synthetic construct
  source 1..151: mol_type = other RNA
tggcagggactccccagcagtgagggtctctctcttcctcttgtgctcttgctggggctggtggtcacggggtctcactccttggaggccctgtgggccatgaggtccaccaccctgttgctgtagccaaattcgttgtcataccaggaaa

SEQ ID NO: 758 - RNA, 151 nt, synthetic construct
  source 1..151: mol_type = other RNA
tggcagggactccccagcagtgagggtctctctcttcctcttgtgctctggctggggctggtggtccagggggctcactcctgggaggccataggggcaatgaggtccaccaccctgttgctgtagccaaattcgttgtcataccaggaaa

SEQ ID NO: 759 - RNA, 150 nt, synthetic construct
  source 1..150: mol_type = other RNA
tggcagggactccccagcagtgagggtctctctcttcctcttgtgctcttgctggggctgatggtccaggggtctcactccttggagtaccaccctgagtgccatgaggtccaccaccctgttgctgtagccaaattcgttgtcatacca

SEQ ID NO: 760 - RNA, 151 nt, synthetic construct
  source 1..151: mol_type = other RNA
tggcagggactccccagcagtgagggtctctctcttcctcttgtgatcttgctggggctggtggtccaggggtcttactagttggaggccatgtgggccatgaggtccaccaccctgttgctgtagccaaattcgttgtcataccaggaaa

SEQ ID NO: 761 - RNA, 150 nt, synthetic construct
  source 1..150: mol_type = other RNA
tggcagggactccccagcagtgagggtctctcgatttctcgtgttctcttgctgtggctggtggtccagtggtctcactccttggagtctcatgtgtgccatgaggtccacctccctgttgctgtagccaaattcgttgtcataccagga

SEQ ID NO: 762 - RNA, 151 nt, synthetic construct
  source 1..151: mol_type = other RNA
tggcagggactccccagcagtgagggtctctctcttcctcttgtgatcttgctggggctggtggtccaggggtctcactagttggaggccatgtgggccatgaggtccaccaccctgttgctgtagccaaattcgttgtcataccaggaaa

SEQ ID NO: 763 - RNA, 151 nt, synthetic construct
  source 1..151: mol_type = other RNA
tggcagggactccccagcagtgagggtctctctcttcctcttgtgctcttgctggggatgggagttcaggggtctcactccttggggccggtgtgggccatgaggtccaccaccctgttgctgtagccaaattcgttgtcataccaggaaa

SEQ ID NO: 764 - RNA, 150 nt, synthetic construct
  source 1..150: mol_type = other RNA
tggcagggactccccagcagtgagggtctctctcttcctcttgtgctcttgctgggcggctggtggtcaaggggtctcactccttgtagaccatgtggaccatgaggtccaccaccctgttgctgtagccaaattcgttgtcataccagg

SEQ ID NO: 765 - RNA, 151 nt, synthetic construct
  source 1..151: mol_type = other RNA
tggcagggactccccagcagtgagggtctctctcttcctcttgtgctcttgctggggctgggggactaggggtctcactccttggtggccatgttggccatgaggtccaccaccctgttgctgtagccaaattcgttgtcataccaggaaa

SEQ ID NO: 766 - RNA, 151 nt, synthetic construct
  source 1..151: mol_type = other RNA
tggcagggactccccagcagtgagggtctctctcttcctcttgtgctcttgctggggctggtggtccagggatctcactccttggaggccatgtgggccatgaggtccaccaccctgttgctgtagccaaattcgttgtcataccaggaaa

SEQ ID NO: 767 - RNA, 151 nt, synthetic construct
  source 1..151: mol_type = other RNA
tggcagggactccccagcagtgagggtctctctcttcctcttgtgtcttggctgggtctggtgatccaggggtctcactccggggaggccatatgggcaatgaggtccaccaccctgttgctgtagccaaattcgttgtcataccaggaaa

SEQ ID NO: 768 - RNA, 150 nt, synthetic construct
  source 1..150: mol_type = other RNA
tggcagggactccccagcagtgagggtctctctcttcctcttgtgcgcttgctatggctggtggtccaggggtctcacttctgacaaagaggccatgtgggctatggagtccaccaccctgttgctgtagccaaattcgttgtcatacca

SEQ ID NO: 769 - RNA, 149 nt, synthetic construct
  source 1..149: mol_type = other RNA
tggcagggactccccagcagtgagggtctctctcttcaatgtgactgggctggggctgttggtccatgggtcttactccttggaggccatgtgggttatgaggtccaccaccctgttgctgtagccaaattcgttgtcataccaggaaa

SEQ ID NO: 770 - RNA, 151 nt, synthetic construct
  source 1..151: mol_type = other RNA
tggcagggactccccagcagtgagggtctctctcttcctcttgtgctcttgctggggctggtggtcccgggatcttactccttggaggccatgtgggccatgaggtccaccaccctgttgctgtagccaaattcgttgtcataccaggaaa

SEQ ID NO: 771 - RNA, 150 nt, synthetic construct
  source 1..150: mol_type = other RNA
tggcagggactccccagcagtgagggtctcctcttcctagatacgctcagctggggctggtggttcagggggctcactccttggcagccatgtggtacaggaggtgtcccaccaacctgttgctgtagccaaattcgttgtcataccagg

SEQ ID NO: 772 - RNA, 151 nt, synthetic construct
  source 1..151: mol_type = other RNA
tggcagggactccccagcagtgagggtctctctattcttcttgtgctctggcttgggctggtggtcaaggggtctcactccttggaggccatgtgggccatgaggtccaccaccctgttgctgtagccaaattcgttgtcataccaggaaa

SEQ ID NO: 773 - RNA, 150 nt, synthetic construct
  source 1..150: mol_type = other RNA
tggcagggactccccagcagtgagggtctctctcttcctcttgtgatttggctgaggatggtggtccagtggtctcactccttggaggccatcaggccctgaggtccaccaccctgttgctgtagccaaattcgttgtcataccaggaaa

SEQ ID NO: 774 - RNA, 151 nt, synthetic construct
  source 1..151: mol_type = other RNA
tggcagggactccccagcagtgagggtctcgctcttcctagtgttatcttgctggggctggtggtccaggggtcttactccgtggaagccatataggttaggaggtccaccaccctgttgctgtagccaaattcgttgtcataccaggaaa

SEQ ID NO: 775 - RNA, 151 nt, synthetic construct
  source 1..151: mol_type = other RNA
tggcagggactccccagcagtgagggtctctctcttcctcttgtgctcttgctggggcgggtggtccaggggtctcacttcttggaggccatgtgggccatgaggtccaccaccctgttgctgtagccaaattcgttgtcataccaggaaa

SEQ ID NO: 776 - RNA, 149 nt, synthetic construct
  source 1..149: mol_type = other RNA
tggcagggactccccagcagtgagggtctctctcttccgtgctcttgctggagctggtggtccaggggtcttacctacgtggaggccaggtgggacaatgaggtccaccaccctgttgctgtagccaaattcgttgtcataccaggaaa

SEQ ID NO: 777 - RNA, 150 nt, synthetic construct
  source 1..150: mol_type = other RNA
tggcagggactccccagcagtgagggtctctctctttcttgtgctcttgctggggctggtggtccaggggtctcactctttgaggccattgttggccacgtgatgaggtccaccaccctgttgctgtagccaaattcgttgtcataccag

SEQ ID NO: 778 - RNA, 150 nt, synthetic construct
  source 1..150: mol_type = other RNA
tggcagggactccccagcagtgagggtctctctcttcctcttgtgcttggctggggctggtggtccatgggtctcactccttgtaggccaggtaggacatgaggtccaccaccctgttgctgtagccaaattcgttgtcataccaggaaa

SEQ ID NO: 779 - RNA, 151 nt, synthetic construct
  source 1..151: mol_type = other RNA
tggcagggactccccagcagtgagggtctctctcttgcgcttgttctctggctggggctggtggtacagggttctcactccttcgaggccatgtgagccatgctggccaccaccctggtgctgtagccaaattcgttgtcataccaggaaa

SEQ ID NO: 780 - RNA, 151 nt, synthetic construct
  source 1..151: mol_type = other RNA
tggcagggactccccagcagtgagggtctctctcttcctcttgtgctcttgctggggctggtggtccaggggtctcacttcttggaggccatgttggccatgaggtccaccaccctgttgctgtagccaaattcgttgtcataccaggaaa

SEQ ID NO: 781 - RNA, 151 nt, synthetic construct
  source 1..151: mol_type = other RNA
tggcagggactccccagcagtgagggtctctctcttcctcttgtgctcttgagggggctggtggtcaagggggctcactctttcaaggccatgtaggacatgaggtccaccaccctgttgctgtagccaaattcgttgtcataccaggaaa

SEQ ID NO: 782 - RNA, 151 nt, synthetic construct
  source 1..151: mol_type = other RNA
tggcagggactccccagcagtgagggtctctctcttcctcttgtgctcttgctggtgctggtggtccggggtactcactaattggaggccctgtgggccatgaggtccaccaccctgttgctgtagccaaattcgttgtcataccaggaaa

SEQ ID NO: 783 - RNA, 151 nt, synthetic construct
  source 1..151: mol_type = other RNA
tggcagggactccccagcagtgagggtctctctcttcctcttgtgctcttgctggtgctggtggtccggggtactcactaattggaggccctgtgggacatggggtccaccaccctgttgctgtagccaaattcgttgtcataccaggaaa

SEQ ID NO: 784 - RNA, 151 nt, synthetic construct
  source 1..151: mol_type = other RNA
tggcagggactccccagcagtgagggtctctctcttcctcttgtgagctggctggggctgttggtacatgggtctcactccgtggaggccatgtgggttatgaggtccaccaccctgttgctgtagccaaattcgttgtcataccaggaaa

SEQ ID NO: 785 - RNA, 150 nt, synthetic construct
  source 1..150: mol_type = other RNA
tggcagggactccccagcagtgagggtctctctcttcctatgttgcctcttgctggggctggtggtccaggggtctcactcctttccggccagagaggacctgaggtccatcatccctgttgctgtagccaaattcgttgtcataccagg

SEQ ID NO: 786 - RNA, 151 nt, synthetic construct
  source 1..151: mol_type = other RNA
tggcagggactccccagcagtgagggtctctctcttcctcttgtgctcttgctggggctggtggtccatgggtctcactccgtggaggcaatgtgggccatgaggtccaccaccctgttgctgtagccaaattcgttgtcataccaggaaa

SEQ ID NO: 787 - RNA, 151 nt, synthetic construct
  source 1..151: mol_type = other RNA
tggcagggactccccagcagtgagggtctctctcttcctcttgtgctcttgctggtgctgggggtccaggggtctcactccgtggaggccaggtgtgccatgaggtccaccaccctgttgctgtagccaaattcgttgtcataccaggaaa

SEQ ID NO: 788 - RNA, 151 nt, synthetic construct
  source 1..151: mol_type = other RNA
tggcagggactccccagcagtgagggtctctctcttcctcttgtgctcttgctggggctggtggtccaggggtctcactcttgtcaggccatgtaggccatgaggtccaccaccctgttgctgtagccaaattcgttgtcataccaggaaa

SEQ ID NO: 789 - RNA, 151 nt, synthetic construct
  source 1..151: mol_type = other RNA
tggcagggactccccagcagtgagggtctctctcttcctcttgtgaccgggcttgggctggtggtccaggggtcttactcttgtcaggccatgtaggccatgaggtccaccaccctgttgctgtagccaaattcgttgtcataccaggaaa

SEQ ID NO: 790 - RNA, 150 nt, synthetic construct
  source 1..150: mol_type = other RNA
tggcagggactccccagcagtgagggtctcgctctcctagtgttctattgatggggcgggtggtccaggggtctcactctttggaggccctgtgggcagtgaggtccaccaccctgttgctgtagccaaattcgttgtcataccaggaaa

SEQ ID NO: 791 - RNA, 151 nt, synthetic construct
  source 1..151: mol_type = other RNA
tggcagggactccccagcagtgagggtctctctcttcctcttgtgaccgggcttgggctggtggtccaggggtctcactcttgtcaggccatgtaggccatgaggtccaccaccctgttgctgtagccaaattcgttgtcataccaggaaa

SEQ ID NO: 792 - RNA, 151 nt, synthetic construct
  source 1..151: mol_type = other RNA
tggcagggactccccagcagtgagggtctctctcttcctcttgtgctcttgctggggatggtggtccaggtgtctcactccttggaggacatgtgggccatgaggtccaccaccctgttgctgtagccaaattcgttgtcataccaggaaa

SEQ ID NO: 793 - RNA, 150 nt, synthetic construct
  source 1..150: mol_type = other RNA
tggcagggactccccagcagtgagggtctctctcttcctcttgtgctcttgctggggctggtggtccaggggtctcactccttggaggccagaggtggccatgaggtccaccaccctgttgctgtagccaaattcgttgtcataccagga

SEQ ID NO: 794 - RNA, 150 nt, synthetic construct
  source 1..150: mol_type = other RNA
tggcagggactccccagcagtgagggtctctctcttcctcttgtgccttgatggggctggtggtcacggggtctcactccttggaggccctgtgggttatgaggtccaccaccctgttgctgtagccaaattcgttgtcataccaggaaa

SEQ ID NO: 795 - RNA, 151 nt, synthetic construct
  source 1..151: mol_type = other RNA
tggcagggactccccagcagtgagggtctctctcttcctcttgtgctcttgctgtggatggtggtccaggtgtctcactccttggaggacatgtgggccatgagttccaccaccctgttgctgtagccaaattcgttgtcataccaggaaa

SEQ ID NO: 796 - RNA, 149 nt, synthetic construct
  source 1..149: mol_type = other RNA
tggcagggactccccagcagtgagggtctctctcttcaatgtgactgggctggggctgttggtccatgggtctcactccttggaggccatgtgggttatgaggtccaccaccctgttgctgtagccaaattcgttgtcataccaggaaa

SEQ ID NO: 797 - RNA, 151 nt, synthetic construct
  source 1..151: mol_type = other RNA
tggcagggactccccagcagtgagggtctctctcttcctcttgtgctcttgctgggactggtggactaggggtctcactacttggtggttatggtggccatgaggtccaccaccctgttgctgtagccaaattcgttgtcataccaggaaa

SEQ ID NO: 798 - RNA, 151 nt, synthetic construct
  source 1..151: mol_type = other RNA
tggcagggactccccagcagtgagggtctctctcttcctcttgtgctcgtgctggggagggtggtacagggatctcactcctttgaggacatgtgggtaatgaggtccaccaccctgttgctgtagccaaattcgttgtcataccaggaaa

SEQ ID NO: 799 - RNA, 151 nt, synthetic construct
  source 1..151: mol_type = other RNA
tggcagggactccccagcagtgagggtctctcgttgactcttggcaccgggcttgggctggtggtccaggggtcttactcttgtcaggccatgtaggccatgaggtccaccaccctgttgctgtagccaaattcgttgtcataccaggaaa

SEQ ID NO: 800 - RNA, 151 nt, synthetic construct
  source 1..151: mol_type = other RNA
tggcagggactccccagcagtgagggtctctctctgcctattggcagctttctggggatgggagttcaggggtctcactccttggggccggtgtgggccgtgaggtcaacaaccaccgttctgtagccaaattcgttgtcataccaggaaa

SEQ ID NO: 801 - RNA, 149 nt, synthetic construct
  source 1..149: mol_type = other RNA
tggcagggactccccagcagtgagggtctctctcttccttgtgagctggctggggctgttggtacatgggtcttactccgtggaggccatgtgggttatgaggtccaccaccctgttgctgtagccaaattcgttgtcataccaggaaa

SEQ ID NO: 802 - RNA, 150 nt, synthetic construct
  source 1..150: mol_type = other RNA
tggcagggactccccagcagtgagggtctctctcttcctcttgtgctcttgctggggctggtggtccaggggtcttactccgtggaggccatgtggggccatgaggtccaccaccctgttgctgtagccaaattcgttgtcataccagga

SEQ ID NO: 803 - RNA, 151 nt, synthetic construct
  source 1..151: mol_type = other RNA
tggcagggactccccagcagtgagggtctcttgtttcctagtgtttcttggctgggtctggtgatccaggggtctcactccggggaggccatatgggcaatgaggtccaccaccctgttgctgtagccaaattcgttgtcataccaggaaa

SEQ ID NO: 804 - RNA, 151 nt, synthetic construct
  source 1..151: mol_type = other RNA
tggcagggactccccagcagtgagggtctctctcttcctcttgtgctcttgctggggctggtgatccagggggctcactccttggaggccatgtaggccatgaggtccaccaccctgttgctgtagccaaattcgttgtcataccaggaaa

SEQ ID NO: 805 - RNA, 151 nt, synthetic construct
  source 1..151: mol_type = other RNA
tggcagggactccccagcagtgagggtctctctcttcctcttgtgatcttgctggggctggtggtccaggggtctcactccgtggaagccatataggttaggaggtccaccaccctgttgctgtagccaaattcgttgtcataccaggaaa

SEQ ID NO: 806 - RNA, 151 nt, synthetic construct
  source 1..151: mol_type = other RNA
tggcagggactccccagcagtgagggtctctctctcctggtttgtagccagcttgggctggtggtccaggagtctcactctttggaggccatgtgggccatgaggtccaccaccctgttgctgtagccaaattcgttgtcataccaggaaa

SEQ ID NO: 807 - RNA, 150 nt, synthetic construct
  source 1..150: mol_type = other RNA
tggcagggactccccagcagtgagggtctctactttctttgattcatctggctggggctggtggtccctgggtcttactccttggaggccagttgggaagctatgaggtccaccaccctgttgctgtagccaaattcgttgtcataccag

SEQ ID NO: 808 - RNA, 151 nt, synthetic construct
  source 1..151: mol_type = other RNA
tggcagggactccccagcagtgagggtctctctcttcctcttgtgctctggcttgggctggtggtcaaggggtctcactccttggaggccatgtgggccatgaggtccaccaccctgttgctgtagccaaattcgttgtcataccaggaaa

SEQ ID NO: 809 - RNA, 151 nt, synthetic construct
  source 1..151: mol_type = other RNA
tggcagggactccccagcagtgagggtctctctcttcctcttgtgctcttgctggggctggtggttcaggggtcttactctgatgaggccatgtgggccatgaggtccaccaccctgttgctgtagccaaattcgttgtcataccaggaaa

SEQ ID NO: 810 - RNA, 151 nt, synthetic construct
  source 1..151: mol_type = other RNA
tggcagggactccccagcagtgagggtctctctcttcctcttgtgttcttgctggggctggtggtccatgggtctcactcattggaggccatgtggtacatgaggtccaccaccctgttgctgtagccaaattcgttgtcataccaggaaa

SEQ ID NO: 811 - RNA, 149 nt, synthetic construct
  source 1..149: mol_type = other RNA
tggcagggactccccagcagtgagggtctctctcttcctcttgtgatcgggcttgggctggtggtccatgggtctcactccttggaggccggtggccctgaggtccaccaccctgttgctgtagccaaattcgttgtcataccaggaaa

SEQ ID NO: 812 - RNA, 151 nt, synthetic construct
  source 1..151: mol_type = other RNA
tggcagggactccccagcagtgagggtctctctcttcctcttgtgttcgtgctggggctgttggttcagggttcttactcagatgaggccatatgggccatgaggtccaccaccctgttgctgtagccaaattcgttgtcataccaggaaa

SEQ ID NO: 813 - RNA, 151 nt, synthetic construct
  source 1..151: mol_type = other RNA
tggcagggactccccagcagtgagggtctctacattcctagtgtgctcgggttggggctggtggtccaggggtctcactccttggaggccatgtgggcaatgaggtccaccaccctgttgctgtagccaaattcgttgtcataccaggaaa

SEQ ID NO: 814 - RNA, 151 nt, synthetic construct
  source 1..151: mol_type = other RNA
tggcagggactccccagcagtgagggtctctctattcttcttgttctcttgctggggctggtggtcccgggatctcactccttggaggccatgtgggcaatgaggtccaccaccctgttgctgtagccaaattcgttgtcataccaggaaa

SEQ ID NO: 815 - RNA, 151 nt, synthetic construct
  source 1..151: mol_type = other RNA
tggcagggactccccagcagtgagggtctctctcttcctcttgtgctcttgctggggctggtggtccaggggtctcactccttggaggccatgtgggcaatgaggtccaccaccctgttgctgtagccaaattcgttgtcataccaggaaa

SEQ ID NO: 816 - RNA, 149 nt, synthetic construct
  source 1..149: mol_type = other RNA
tggcagggactccccagcagtgagggtctctctcttccgtgctcttgctggagctggtggtccaggggtctcacctacgtggaggccaggtgggacaatgaggtccaccaccctgttgctgtagccaaattcgttgtcataccaggaaa

SEQ ID NO: 817 - RNA, 151 nt, synthetic construct
  source 1..151: mol_type = other RNA
tggcagggactccccagcagtgagggtctctctcttcctcttgtgctcttgctggggctggtggtcccgggatctcactccttggaggccatgtgggccatgaggtccaccaccctgttgctgtagccaaattcgttgtcataccaggaaa

SEQ ID NO: 818 - RNA, 151 nt, synthetic construct
  source 1..151: mol_type = other RNA
tggcagggactccccagcagtgagggtctctctcttcctcttgtgctcttgctggggcttgtggtccatggggctcacttcttggcggccagatgggccatgaggtccaccaccctgttgctgtagccaaattcgttgtcataccaggaaa

SEQ ID NO: 819 - RNA, 151 nt, synthetic construct
  source 1..151: mol_type = other RNA
tggcagggactccccagcagtgagggtctctctctcctggtttgtagccagcttgggctggtggtccaggagtcttactctttggaggccatgtgggccatgaggtccaccaccctgttgctgtagccaaattcgttgtcataccaggaaa

SEQ ID NO: 820 - RNA, 150 nt, synthetic construct
  source 1..150: mol_type = other RNA
tggcagggactccccagcagtgagggtctctctcttcctcttgtgctcttgctggggttggtggtgtggggtttcactatacccttggaggtcctgtttgccatgaggtccaccaccctgttgctgtagccaaattcgttgtcataccag

SEQ ID NO: 821 - RNA, 147 nt, synthetic construct
  source 1..147: mol_type = other RNA
tggcagggactccccagcagtgagggtctcaggcttcctcttgtgagatgctggggctggtggtccagggtgctcacttctgcggccatggaggccatgagcaccatcacctgttgctgtagccaaattcgttgtcataccaggaaa

SEQ ID NO: 822 - RNA, 151 nt, synthetic construct
  source 1..151: mol_type = other RNA
tggcagggactccccagcagtgagggtctctctcttcctcttgtgttcgtgctggggctggtggtccagggctcttactccttggaggccatgggggccatgaggtccaccaccctgttgctgtagccaaattcgttgtcataccaggaaa

SEQ ID NO: 823 - RNA, 151 nt, synthetic construct
  source 1..151: mol_type = other RNA
tggcagggactccccagcagtgagggtctctctcttcctcttgtgttcttgctggggctggtggtccagggttctcactccttggaggccagatggggcatgaggtccaccaccctgttgctgtagccaaattcgttgtcataccaggaaa

SEQ ID NO: 824 - RNA, 151 nt, synthetic construct
  source 1..151: mol_type = other RNA
tggcagggactccccagcagtgagggtctctctcttcctcttgtgctcttgctggggctggtgtccaaggggtctcactcgtgaccggccatgtgggccatgaggtccaccaccctgttgctgtagccaaattcgttgtcataccaggaaa

SEQ ID NO: 825 - RNA, 151 nt, synthetic construct
  source 1..151: mol_type = other RNA
tggcagggactccccagcagtgagggtctctctcttcctcttgtgttcttgctggggctggtgatccaggtgtctcaatccttggaggccatgtgggccatgagggccaccaccctgttgctgtagccaaattcgttgtcataccaggaaa

SEQ ID NO: 826 - RNA, 150 nt, synthetic construct
  source 1..150: mol_type = other RNA
tggcagggactccccagcagtgagggtctctctcggcctctggtgctcttgctgggcggctggtggtcaaggggtctcactccttgtagaccatgtggaccatgaggtccaccaccctgttgctgtagccaaattcgttgtcataccagg

SEQ ID NO: 827 - RNA, 150 nt, synthetic construct
  source 1..150: mol_type = other RNA
tggcagggactccccagcagtgagggtctctctcttcctcttgtgcatcttgctggggctggtggttcaggggtctcactctgatgaggccatgtgggccgtgaggtccaccaccctgttgctgtagccaaattcgttgtcataccagga

SEQ ID NO: 828 - RNA, 149 nt, synthetic construct
  source 1..149: mol_type = other RNA
tggcagggactccccagcagtgagggtctctctcttccttgtgagctggctggggctgttggtacatgggtctcactccgtggaggccatgtgggttatgaggtccaccaccctgttgctgtagccaaattcgttgtcataccaggaaa

SEQ ID NO: 829 - RNA, 150 nt, synthetic construct
  source 1..150: mol_type = other RNA
tggcagggactccccagcagtgagggtctctatcttcctcttgtgctccttgttggggctggtggtccacgggtctcactcctttgagtccatgtgggccaggacatgcaacaccctgttgctgtagccaaattcgttgtcataccagga

SEQ ID NO: 830 - RNA, 151 nt, synthetic construct
  source 1..151: mol_type = other RNA
tggcagggactccccagcagtgagggtctctctcttcctcttgtgctcttgctggggctggtggtccaggagtcttactctttggaggccatgtgggccatgaggtccaccaccctgttgctgtagccaaattcgttgtcataccaggaaa

SEQ ID NO: 831 - RNA, 150 nt, synthetic construct
  source 1..150: mol_type = other RNA
tggcagggactccccagcagtgagggtctctctcgtcctggcttgtgatcttgctggggctggtggtacaggggtctcactacggggaggccatgtgggccctgaggtccaccaccctgttgctgtagccaaattcgttgtcataccagg

SEQ ID NO: 832 - RNA, 150 nt, synthetic construct
  source 1..150: mol_type = other RNA
tggcagggactccccagcagtgagggtctctctctgcctagtatgtgatcttgctggggctggtggtccaggggtcttactcaggggagtccatgtgggttatgaggtccaccaccctgttgctgtagccaaattcgttgtcataccagg

SEQ ID NO: 833 - RNA, 150 nt, synthetic construct
  source 1..150: mol_type = other RNA
tggcagggactccccagcagtgagggtctctctcttccgtttaaatgctctggctggggctggtggtccagggggcttactcctgggaggccataggggcaatgaggtccaccaccctgttgctgtagccaaattcgttgtcataccagg

SEQ ID NO: 834 - RNA, 151 nt, synthetic construct
  source 1..151: mol_type = other RNA
tggcagggactccccagcagtgagggtctctctcttcctcttgtgctcttgctggggctggtggtccatgggtcttactccgtggaggcaatgtgggccatgaggtccaccaccctgttgctgtagccaaattcgttgtcataccaggaaa

SEQ ID NO: 835 - RNA, 149 nt, synthetic construct
  source 1..149: mol_type = other RNA
tggcagggactccccagcagtgagggtctctctcttcctctgcgactcgtgctggggctgggtctaggggtctcactcattgtaggccctgtgggctgtgagttataccaccctgttgctgtagccaaattcgttgtcataccaggaaa

SEQ ID NO: 836 - RNA, 150 nt, synthetic construct
  source 1..150: mol_type = other RNA
tggcagggactccccagcagtgagggtctctctcttcctcttgtgcatcttgctggggctggtggttcaggggtcttactctgatgaggccatgtgggccgtgaggtccaccaccctgttgctgtagccaaattcgttgtcataccagga

SEQ ID NO: 837 - RNA, 151 nt, synthetic construct
  source 1..151: mol_type = other RNA
tggcagggactccccagcagtgagggtctctctcttcatcttgtgctcgtgctgaggctggtggtccaggggtcttactccgtggaggccatgtggggcctgaggtccaccaccctgttgctgtagccaaattcgttgtcataccaggaaa

SEQ ID NO: 838 - RNA, 151 nt, synthetic construct
  source 1..151: mol_type = other RNA
tggcagggactccccagcagtgagggtctctctcttcctcttgtgctcttgcgagtttaggtggtgcaggggtctcactccttgtaggaaatgtgggtcatgagttccaccaccctgttgctgtagccaaattcgttgtcataccaggaaa

SEQ ID NO: 839 - RNA, 151 nt, synthetic construct
  source 1..151: mol_type = other RNA
tggcagggactccccagcagtgagggtctctctcttcctcttgtgctcttgctggggctggtggtccatgggtctcactccttgtaggccaggtaggccatgaggtccaccaccctgttgctgtagccaaattcgttgtcataccaggaaa

SEQ ID NO: 840 - RNA, 150 nt, synthetic construct
  source 1..150: mol_type = other RNA
tggcagggactccccagcagtgagggtctctagtttcatcttgttatcttgcttaggatggtggtccaggggtctcactcttggaggccatggggttcatgaggtccaccaccctgttgctgtagccaaattcgttgtcataccaggaaa

SEQ ID NO: 841 - RNA, 151 nt, synthetic construct
  source 1..151: mol_type = other RNA
tggcagggactccccagcagtgagggtctctctcttcctcttgtgctcttgctggggcttgtggtccaggggtctcactcctgggaggccatatgggccatgaggtccaccaccctgttgctgtagccaaattcgttgtcataccaggaaa

SEQ ID NO: 842 - RNA, 150 nt, synthetic construct
  source 1..150: mol_type = other RNA
tggcagggactccccagcagtgagggtctctagcttcatcttgttatttggctgaggatggtggtccagtggtctcactccttggaggccatcaggccctgaggtccaccaccctgttgctgtagccaaattcgttgtcataccaggaaa

SEQ ID NO: 843 - RNA, 150 nt, synthetic construct
  source 1..150: mol_type = other RNA
tggcagggactccccagcagtgagggtctctctcttcaaatcttgttctcttgctggggctggtggtccaggggtctcactccgtggaggccatggaggccatgaggtccaccaccctgttgctgtagccaaattcgttgtcataccagg

SEQ ID NO: 844 - RNA, 151 nt, synthetic construct
  source 1..151: mol_type = other RNA
tggcagggactccccagcagtgagggtctctctcttcctcttgtgctcttgctgggtctgttggtccaggggtctcactcattgggggccagaggtgccatgaggtccaccaccctgttgctgtagccaaattcgttgtcataccaggaaa

SEQ ID NO: 845 - RNA, 151 nt, synthetic construct
  source 1..151: mol_type = other RNA
tggcagggactccccagcagtgagggtctctctcttcctcttgtgctcttgctgggtctggtgatccaggggtctcactccggggaggccatatgggccatgaggtccaccaccctgttgctgtagccaaattcgttgtcataccaggaaa

SEQ ID NO: 846 - RNA, 151 nt, synthetic construct
  source 1..151: mol_type = other RNA
tggcagggactccccagcagtgagggtctctcttgtccgagattgtgatcgggcttgggctggtggtccatgggtctcactccttggaggccggtggccctgaggtccaccaccctgttgctgtagccaaattcgttgtcataccaggaaa

SEQ ID NO: 847 - RNA, 151 nt, synthetic construct
  source 1..151: mol_type = other RNA
tggcagggactccccagcagtgagggtctcttgtttcttcttgttctcgggctggggctggtggtccagggagctcactccttggaggccgtgtgggttatgaggtccaccaccctgttgctgtagccaaattcgttgtcataccaggaaa

SEQ ID NO: 848 - RNA, 150 nt, synthetic construct
  source 1..150: mol_type = other RNA
tggcagggactccccagcagtgagggtctcttcttcttaaacgtgtgatcttgctggggcttgtggtccaggggtcttactcctgggaggccatatgggccatgaggtccaccaccctgttgctgtagccaaattcgttgtcataccagg

SEQ ID NO: 849 - RNA, 150 nt, synthetic construct
  source 1..150: mol_type = other RNA
tggcagggactccccagcagtgagggtctctctcttcctcttgtgctcttgctggggttggggtccgggggtctcactatacccttggaggtcatgttgccatgaggtccaccaccctgttgctgtagccaaattcgttgtcataccagg

SEQ ID NO: 850 - RNA, 151 nt, synthetic construct
  source 1..151: mol_type = other RNA
tggcagggactccccagcagtgagggtctctctcttcctcttgtgatctggctgaggctggtggtccatgggtatcactccgtggaggtcatatgggccatgaggtccaccaccctgttgctgtagccaaattcgttgtcataccaggaaa

SEQ ID NO: 851 - RNA, 151 nt, synthetic construct
  source 1..151: mol_type = other RNA
tggcagggactccccagcagtgagggtctctctcttcctcttgtgctcgtgctggggagggtggtacagggatctcactcctttgaggacatgtgggtaatgaggtccaccctcctgttgctgtagccaaattcgttgtcataccaggaaa

SEQ ID NO: 852 - RNA, 151 nt, synthetic construct
  source 1..151: mol_type = other RNA
tggcagggactccccagcagtgagggtctctctcttcctcttgtgctcttgctggggcttgtggtccatggggctcacttcttggcggccaggggggccatgaggtccaccaccctgttgctgtagccaaattcgttgtcataccaggaaa

SEQ ID NO: 853 - RNA, 151 nt, synthetic construct
  source 1..151: mol_type = other RNA
tggcagggactccccagcagtgagggtctctacattcctagtgtgctcgggttggggctggtggtccaggggtcttactccttggaggccatgtgggcaatgaggtccaccaccctgttgctgtagccaaattcgttgtcataccaggaaa

SEQ ID NO: 854 - RNA, 150 nt, synthetic construct
  source 1..150: mol_type = other RNA
tggcagggactccccagcagtgagggtctctctcttcatcttggcctcttgctggggctggtggtacagggttcttactccttggaggccatttgcggccatgaggtccaccaccctgttgctgtagccaaattcgttgtcataccagga

SEQ ID NO: 855 - RNA, 151 nt, synthetic construct
  source 1..151: mol_type = other RNA
tggcagggactccccagcagtgagggtctctctcttcctcttgtgctcttgctggggctggtggtccagggttcttactccttggaggccagatgggccatgaggtccaccaccctgttgctgtagccaaattcgttgtcataccaggaaa

SEQ ID NO: 856 - RNA, 151 nt, synthetic construct
  source 1..151: mol_type = other RNA
tggcagggactccccagcagtgagggtctctctcttcctcttgtgctcttgctggggctggtggtccaggggtcttactccgtggaagccatataggccatgaggtccaccaccctgttgctgtagccaaattcgttgtcataccaggaaa

SEQ ID NO: 857 - RNA, 149 nt, synthetic construct
  source 1..149: mol_type = other RNA
tggcagggactccccagcagtgagggtctctctcttacttgtggctcgtggtggcactggtggccaggggtctcactccttggaggccatgtgggacatgaggtccaaccccttgttgttgtagccaaattcgttgtcataccaggaaa

SEQ ID NO: 858 - RNA, 151 nt, synthetic construct
  source 1..151: mol_type = other RNA
tggcagggactccccagcagtgagggtctctctcttcctcttgtgctcttgctggggctggtgggtcaggggtcttactttgtggaggccagatgggccatgaggtccaccaccctgttgctgtagccaaattcgttgtcataccaggaaa

SEQ ID NO: 859 - RNA, 151 nt, synthetic construct
  source 1..151: mol_type = other RNA
tggcagggactccccagcagtgagggtctctctcttcctcttgtgcttgtgctggggctggtggtccagtggtcttactacggggaagccatggaggccatgaggtccaccaccctgttgctgtagccaaattcgttgtcataccaggaaa

SEQ ID NO: 860 - RNA, 149 nt, synthetic construct
  source 1..149: mol_type = other RNA
tggcagggactccccagcagtgagggtctctagcttcattgtgatctggctgaggctggtggtccatgggtatcactccgtggaggtcatatgggccatgaggtccaccaccctgttgctgtagccaaattcgttgtcataccaggaaa

SEQ ID NO: 861 - RNA, 150 nt, synthetic construct
  source 1..150: mol_type = other RNA
tggcagggactccccagcagtgagggtctctctcgtctgctacattgggctcgtctagggctggaggtcccggaggtctcactccttggccatggtgggcaccatgtggtccaccaccctgttgctgtagccaaattcgttgtcatacca

SEQ ID NO: 862 - RNA, 151 nt, synthetic construct
  source 1..151: mol_type = other RNA
tggcagggactccccagcagtgagggtctctctcttcctcttgtgctcttgctggggcttgtgatccaggggtctcactctttggacgccatgtgggccatgaggtccaccaccctgttgctgtagccaaattcgttgtcataccaggaaa

SEQ ID NO: 863 - RNA, 151 nt, synthetic construct
  source 1..151: mol_type = other RNA
tggcagggactccccagcagtgagggtctctctcttcctcttgtgctcttgctggggctggtggtccatgggtctcacttctttggacgcatggaggccatgaggtccaccaccctgttgctgtagccaaattcgttgtcataccaggaaa

SEQ ID NO: 864 - RNA, 151 nt, synthetic construct
  source 1..151: mol_type = other RNA
tggcagggactccccagcagtgagggtctctctcttcctcttgtgctcttgctggggctggtggtccaggggtctcactccttggaggccagaggggccatgaggtccaccaccctgttgctgtagccaaattcgttgtcataccaggaaa

SEQ ID NO: 865 - RNA, 150 nt, synthetic construct
  source 1..150: mol_type = other RNA
tggcagggactccccagcagtgagggtctctctattcttcttgtgctcttgatggggctggtggttaaggtatctcactccttggcggcaggggggccatgaggtccaccaccctgttgctgtagccaaattcgttgtcataccaggaaa

SEQ ID NO: 866 - RNA, 150 nt, synthetic construct
  source 1..150: mol_type = other RNA
tggcagggactccccagcagtgagggtctctctcttcctcttgtgctcttgctggggctggtggtccaggggtctcacttctgacaaagaggccatgtgggccatgaggtccaccaccctgttgctgtagccaaattcgttgtcatacca

SEQ ID NO: 867 - RNA, 150 nt, synthetic construct
  source 1..150: mol_type = other RNA
tggcagggactccccagcagtgagggtctctctcttcctcttgtgtagccagcttgggctggtggtccaggagtcttactctttggaggccatgtgggccatgaggtccaccaccctgttgctgtagccaaattcgttgtcataccagga

SEQ ID NO: 868 - RNA, 151 nt, synthetic construct
  source 1..151: mol_type = other RNA
tggcagggactccccagcagtgagggtctctcgattcagcttcgtgctcttgctgtggatggtgggacagggtcgccactacttggaggacatgtgggccatgagcgccaccaactgttgctgtagccaaattcgttgtcataccaggaaa

SEQ ID NO: 869 - RNA, 151 nt, synthetic construct
  source 1..151: mol_type = other RNA
tggcagggactccccagcagtgagggtctctctcttcctcttgtgctcgtgcgaggactggtggactaggggtctcactacttggtggttatggtggccatgaggtccaccaccctgttgctgtagccaaattcgttgtcataccaggaaa

SEQ ID NO: 870 - RNA, 151 nt, synthetic construct
  source 1..151: mol_type = other RNA
tggcagggactccccagcagtgagggtctctctcttcctcttgtgttcgtgctggggctgttggttcagggttctcactcagatgaggccatatgggccatgaggtccaccaccctgttgctgtagccaaattcgttgtcataccaggaaa

SEQ ID NO: 871 - RNA, 144 nt, synthetic construct
  source 1..144: mol_type = other RNA
tggcagggactccccagcagtgagggtctctctcttcctcttgtgctcgtgctgtggatggttatccaggggtctcactcctttgaggacatgtggggtccaccaccctgttgctgtagccaaattcgttgtcataccaggaaa

SEQ ID NO: 872 - RNA, 151 nt, synthetic construct
  source 1..151: mol_type = other RNA
tggcagggactccccagcagtgagggtctctctcttcctcttgtgctcttgctggggctggtggtccatgggtcttactcattggaggccatgtgggccatgaggtccaccaccctgttgctgtagccaaattcgttgtcataccaggaaa

SEQ ID NO: 873 - RNA, 151 nt, synthetic construct
  source 1..151: mol_type = other RNA
tggcagggactccccagcagtgagggtctctctcttcctcttgtgctcgggttggggctggtggtccaggggtcttactccttggaggccatgtgggcaatgaggtccaccaccctgttgctgtagccaaattcgttgtcataccaggaaa

SEQ ID NO: 874 - RNA, 150 nt, synthetic construct
  source 1..150: mol_type = other RNA
tggcagggactccccagcagtgagggtctctctcttcctcttgtgctcttgctggggacatggtgggacaggtgtctcactccttggatgccatgtgggccatgaggtccaccaccctgttgctgtagccaaattcgttgtcataccagg

SEQ ID NO: 875 - RNA, 151 nt, synthetic construct
  source 1..151: mol_type = other RNA
tggcagggactccccagcagtgagggtctctctcttcctcttgtgctcttgctggggcgggtggtccaggggtcttacttcttggaggccatgtgggccatgaggtccaccaccctgttgctgtagccaaattcgttgtcataccaggaaa

SEQ ID NO: 876 - RNA, 150 nt, synthetic construct
  source 1..150: mol_type = other RNA
tggcagggactccccagcagtgagggtctctctcttcctcttgtgctcttgctatggctgatggtccaggggtctcactccttggagtaccaccctgagtgccatgaggtccaccaccctgttgctgtagccaaattcgttgtcatacca

SEQ ID NO: 877 - RNA, 150 nt, synthetic construct
  source 1..150: mol_type = other RNA
tggcagggactccccagcagtgagggtctctcgcttcctattgttctcttgctatggctgatggtccaggggtctcactccttggagtaccaccctgagtgccatgaggtccgccctaccgttgctgtagccaaattcgttgtcatacca

SEQ ID NO: 878 - RNA, 150 nt, synthetic construct
  source 1..150: mol_type = other RNA
tggcagggactccccagcagtgagggtctctctcttcctcttgtgctcagctggggctggtggttcagggggctcactccttggcagccatgtggtacaggaggtccaccaccctgttgctgtagccaaattcgttgtcataccaggaaa

SEQ ID NO: 879 - RNA, 151 nt, synthetic construct
  source 1..151: mol_type = other RNA
tggcagggactccccagcagtgagggtctctctcttcctcttgtgctcttgctggggctggtggtccaggggtctcactcctttccggccagagaggccatgaggtccaccaccctgttgctgtagccaaattcgttgtcataccaggaaa

SEQ ID NO: 880 - RNA, 151 nt, synthetic construct
  source 1..151: mol_type = other RNA
tggcagggactccccagcagtgagggtctcgctctgcctcttgtgctcttgctggtgctggtggtccggggtactcactaattggaggccctgtgggacatggggtctaccaccctgttgctgtagccaaattcgttgtcataccaggaaa

SEQ ID NO: 881 - RNA, 151 nt, synthetic construct
  source 1..151: mol_type = other RNA
tggcagggactccccagcagtgagggtctctctcttcctcttgtgctcttgctagggctgggggactaggggtctcactccttggtggccatgttggccatgaggtccaccaccctgttgctgtagccaaattcgttgtcataccaggaaa

SEQ ID NO: 882 - RNA, 150 nt, synthetic construct
  source 1..150: mol_type = other RNA
tggcagggactccccagcagtgagggtctctcgattcctctgtgggctcttgctgtggctggtgggtcaggggtctcactttgtggaggccagatgggcagtgaggtccaccaccctgttgctgtagccaaattcgttgtcataccagga

SEQ ID NO: 883 - RNA, 150 nt, synthetic construct
  source 1..150: mol_type = other RNA
tggcagggactccccagcagtgagggtctctctcttcctcttgtgctcttgatggggctggtggtccaggggtctcactccttgaaggccatatggcgctatgaggtccaccaccctgttgctgtagccaaattcgttgtcataccagga

SEQ ID NO: 884 - RNA, 147 nt, synthetic construct
  source 1..147: mol_type = other RNA
tggcagggactccccagcagtgagggtctcaggcttcctcttgtgagatgctggggctggtggtccagggtgcttacttctgcggccatggaggccatgagcaccatcacctgttgctgtagccaaattcgttgtcataccaggaaa

SEQ ID NO: 885 - RNA, 149 nt, synthetic construct
  source 1..149: mol_type = other RNA
tggcagggactccccagcagtgagggtctctagcttcattgtgatctggctgaggctggtggtccatgggtattactccgtggaggtcatatgggccatgaggtccaccaccctgttgctgtagccaaattcgttgtcataccaggaaa

SEQ ID NO: 886 - RNA, 151 nt, synthetic construct
  source 1..151: mol_type = other RNA
tggcagggactccccagcagtgagggtctctctcttcctggcttgtgctcttgctggggctggtgtcagtggtcttactccttggaggccatgggggtcatgaggtccaccaccctgttgctgtagccaaattcgttgtcataccaggaaa

SEQ ID NO: 887 - RNA, 151 nt, synthetic construct
  source 1..151: mol_type = other RNA
tggcagggactccccagcagtgagggtctctctcttcctcttgtgctcttgctggggctggtggtccatgggtatcactccgtggaggtcatatgggccatgaggtccaccaccctgttgctgtagccaaattcgttgtcataccaggaaa

SEQ ID NO: 888 - RNA, 150 nt, synthetic construct
  source 1..150: mol_type = other RNA
tggcagggactccccagcagtgagggtctctctcttcctcttgtgctcttgctggggatggttatccaggggtctcactcctttgaggacatgtggccatgaggtccaccaccctgttgctgtagccaaattcgttgtcataccaggaaa

SEQ ID NO: 889 - RNA, 151 nt, synthetic construct
  source 1..151: mol_type = other RNA
tggcagggactccccagcagtgagggtctctctcttcctcttgtgctcttgctgggtctggtgatccaggggtcttactccggggaggccatatgggccatgaggtccaccaccctgttgctgtagccaaattcgttgtcataccaggaaa

SEQ ID NO: 890 - RNA, 150 nt, synthetic construct
  source 1..150: mol_type = other RNA
tggcagggactccccagcagtgagggtctctctcttccatacttgttactgagcgggggctggtggtccaggggtcttactcagtggaggccatgtgggacatgaggtccaccaccctgttgctgtagccaaattcgttgtcataccagg

SEQ ID NO: 891 - RNA, 150 nt, synthetic construct
  source 1..150: mol_type = other RNA
tggcagggactccccagcagtgagggtctctctcttcctcttgtgctctggtttaggcttgtggtccatggggctcacttcttggcggccaggggggacaatgaggtccaccaccctgttgctgtagccaaattcgttgtcataccagga

SEQ ID NO: 892 - RNA, 151 nt, synthetic construct
  source 1..151: mol_type = other RNA
tggcagggactccccagcagtgagggtctctttcttcctcttgttacttggctgcggctggtgatccagggggctcactccttggaggccatgtaggtcatgaggtccaccaccctgttgctgtagccaaattcgttgtcataccaggaaa

SEQ ID NO: 893 - RNA, 150 nt, synthetic construct
  source 1..150: mol_type = other RNA
tggcagggactccccagcagtgagggtctctctcttcctcttgtgctcttgatggggctggtggttaaggtatctcactccttggcggcaggggggccatgaggtccaccaccctgttgctgtagccaaattcgttgtcataccaggaaa

SEQ ID NO: 894 - RNA, 149 nt, synthetic construct
  source 1..149: mol_type = other RNA
tggcagggactccccagcagtgagggtctctctctttactttgctcttgctgtagctggtggtacaggtatctcaatccttggaggccatttgggccatgaggtccacccccctgttggtgtagccaaattcgttgtcataccaggaaa

SEQ ID NO: 895 - RNA, 149 nt, synthetic construct
  source 1..149: mol_type = other RNA
tggcagggactccccagcagtgagggtctctatctttatatctgcttggctggggctggtggtccatgggtcttactccttgtaggccaggtaggacatgaggtccaccaccctgttgctgtagccaaattcgttgtcataccaggaaa

SEQ ID NO: 896 - RNA, 151 nt, synthetic construct
  source 1..151: mol_type = other RNA
tggcagggactccccagcagtgagggtctctctcttcctcttgtgctcttgctggggctggtggtccaggggtcttactccttgaaggccatatgggccatgaggtccaccaccctgttgctgtagccaaattcgttgtcataccaggaaa

SEQ ID NO: 897 - RNA, 151 nt, synthetic construct
  source 1..151: mol_type = other RNA
tggcagggactccccagcagtgagggtctctctcttcctcttgtgagctttctggggatgggagttcaggggtctcactccttggggccggtgtgggccgtgaggtccaccaccctgttgctgtagccaaattcgttgtcataccaggaaa

SEQ ID NO: 898 - RNA, 151 nt, synthetic construct
  source 1..151: mol_type = other RNA
tggcagggactccccagcagtgagggtctctctcttcctcttgtgctctggctggggctggtggtccatgggtctcacttctttggacgcatggaggcactgaggtccaccaccctgttgctgtagccaaattcgttgtcataccaggaaa

SEQ ID NO: 899 - RNA, 150 nt, synthetic construct
  source 1..150: mol_type = other RNA
tggcagggactccccagcagtgagggtctctttatcctcttgtgctcttgctggggctgagatggtccaggggtctcactcctctggaggccatgtgggccatgaggtccaccaccctgttgctgtagccaaattcgttgtcataccagg

SEQ ID NO: 900 - RNA, 150 nt, synthetic construct
  source 1..150: mol_type = other RNA
tggcagggactccccagcagtgagggtctctctcttcctcttgtgctcttgctggggctggtgttccaggggtctcacctccttggaggccatgtgggccatgaggtccaccaccctgttgctgtagccaaattcgttgtcataccagga

SEQ ID NO: 901 - RNA, 151 nt, synthetic construct
  source 1..151: mol_type = other RNA
tggcagggactccccagcagtgagggtctctctcttcctcttgtgctcttgctggggctggtggtccctgggtctcactccttggaggccatgtgggccatgaggtccaccaccctgttgctgtagccaaattcgttgtcataccaggaaa

SEQ ID NO: 902 - RNA, 150 nt, synthetic construct
  source 1..150: mol_type = other RNA
tggcagggactccccagcagtgagggtctcaggcttcctcctcgtgtgcgattactagggctggtgtgccaggggtctcaatccttggaggccatgtgggccatgaggtccaccaccctgttggtgtagccaaattcgttgtcataccag

SEQ ID NO: 903 - RNA, 151 nt, synthetic construct
  source 1..151: mol_type = other RNA
tggcagggactccccagcagtgagggtctctctcttcctcttgtgttcttgctggggctggtggtccatgggtcttactcattggaggccatgtggtacatgaggtccaccaccctgttgctgtagccaaattcgttgtcataccaggaaa

SEQ ID NO: 904 - RNA, 151 nt, synthetic construct
  source 1..151: mol_type = other RNA
tggcagggactccccagcagtgagggtctctcgattcttcttgtgatcttgctggggctggtggtccaggggtctcacttcttggaggccatgttggtaatgaggtccaccaccctgttgctgtagccaaattcgttgtcataccaggaaa

SEQ ID NO: 905 - RNA, 151 nt, synthetic construct
  source 1..151: mol_type = other RNA
tggcagggactccccagcagtgagggtctctctcttcctcttgtgctcttgctggggctgttggtacatgggtctcactccgtggaggccatgtgggccatgaggtccaccaccctgttgctgtagccaaattcgttgtcataccaggaaa

SEQ ID NO: 906 - RNA, 151 nt, synthetic construct
  source 1..151: mol_type = other RNA
tggcagggactccccagcagtgagggtctctctcttcctcttgtgctcttcctggggttggggggcccggggtctcactcctttccagccatgtgggaaatgaggtccaccaccctgttgctgtagccaaattcgttgtcataccaggaaa

SEQ ID NO: 907 - RNA, 151 nt, synthetic construct
  source 1..151: mol_type = other RNA
tggcagggactccccagcagtgagggtctctctcttcctcttgtgctcttgctggggctggtggttcagggggcttactccttggcagccatgtgggccatgaggtccaccaccctgttgctgtagccaaattcgttgtcataccaggaaa

SEQ ID NO: 908 - RNA, 150 nt, synthetic construct
  source 1..150: mol_type = other RNA
tggcagggactccccagcagtgagggtctctcgattcctctgtgggctcttgctgtggctggtgggtcaggggtcttactttgtggaggccagatgggcagtgaggtccaccaccctgttgctgtagccaaattcgttgtcataccagga

SEQ ID NO: 909 - RNA, 151 nt, synthetic construct
  source 1..151: mol_type = other RNA
tggcagggactccccagcagtgagggtctctctcttcctcttgtgctcttgctggggctggtggttaaggggtctcactccttggagtaaatgtgggccatgaggtccaccaccctgttgctgtagccaaattcgttgtcataccaggaaa

SEQ ID NO: 910 - RNA, 145 nt, synthetic construct
  source 1..145: mol_type = other RNA
tggcagggactccccagcagtgagggtctctgtcctgtgctcttgagggggctggtggtcaagggggctcactctttcaaggccatgtaggacatgaggtccaccacccgattgctgtagccaaattcgttgtcataccaggaaa

SEQ ID NO: 911 - RNA, 151 nt, synthetic construct
  source 1..151: mol_type = other RNA
tggcagggactccccagcagtgagggtctctcgcttcctcttgtgttcgtgctggggctggtggtccagggctctcactccttggaggccatgggggccatgaggtccaccaccctgttgctgtagccaaattcgttgtcataccaggaaa

SEQ ID NO: 912 - RNA, 149 nt, synthetic construct
  source 1..149: mol_type = other RNA
tggcagggactccccagcagtgagggtctctctcttcctcttgtgctcttgctggggctggtgtcagtggtctcactccttggaggccatgggggtcatgaggtccaccaccctgttgctgtagccaaattcgttgtcataccaggaaa

SEQ ID NO: 913 - RNA, 150 nt, synthetic construct
  source 1..150: mol_type = other RNA
tggcagggactccccagcagtgagggtctctctcttcctcttgtgcttggctggggctggtggtccatgggtcttactccttgtaggccaggtaggacatgaggtccaccaccctgttgctgtagccaaattcgttgtcataccaggaaa

SEQ ID NO: 914 - RNA, 151 nt, synthetic construct
  source 1..151: mol_type = other RNA
tggcagggactccccagcagtgagggtctctctcttcctcttgtgatcttgctggggctggtggtccagggtacttactccttggaggccatttgggcaatgaggtccaccaccctgttgctgtagccaaattcgttgtcataccaggaaa

SEQ ID NO: 915 - RNA, 150 nt, synthetic construct
  source 1..150: mol_type = other RNA
tggcagggactccccagcagtgagggtctctctcttcctaatgcatctggctgaggctggtggtccaggggtctcactccttggaggccagaggtgctatgaggtccaccaccctgttgctgtagccaaattcgttgtcataccaggaaa

SEQ ID NO: 916 - RNA, 151 nt, synthetic construct
  source 1..151: mol_type = other RNA
tggcagggactccccagcagtgagggtctctctcttcctcttgtgctcttgctggggctggtggtccaggggtcttactagttggaggccatgtgggccatgaggtccaccaccctgttgctgtagccaaattcgttgtcataccaggaaa

SEQ ID NO: 917 - RNA, 151 nt, synthetic construct
  source 1..151: mol_type = other RNA
tggcagggactccccagcagtgagggtctctctcttcctcttgtgctcttgctggggttgggggtccaggggtcgtactcctttccggccatgtgggccatgaggtccaccaccctgttgctgtagccaaattcgttgtcataccaggaaa

SEQ ID NO: 918 - RNA, 150 nt, synthetic construct
  source 1..150: mol_type = other RNA
tggcagggactccccagcagtgagggtctctctcttcctcttgtgagctggctggggctgttgttccatggatctcactccgatcgaggccatgtgggttatgaggtccaccaccctgttgctgtagccaaattcgttgtcataccagga

SEQ ID NO: 919 - RNA, 150 nt, synthetic construct
  source 1..150: mol_type = other RNA
tggcagggactccccagcagtgagggtctctctcttcctcttgtgctcttgctggggctggtgttcgagggggtctcactcctttgcggcgatgtgggccatgaggtccaccaccctgttgctgtagccaaattcgttgtcataccagga

SEQ ID NO: 920 - RNA, 150 nt, synthetic construct
  source 1..150: mol_type = other RNA
tggcagggactccccagcagtgagggtctctctcgtcctggcttgtgatcttgctggggctggtggtacaggggtcttactacggggaggccatgtgggccctgaggtccaccaccctgttgctgtagccaaattcgttgtcataccagg

SEQ ID NO: 921 - RNA, 146 nt, synthetic construct
  source 1..146: mol_type = other RNA
tggcagggactccccagcagtgagggtctctctcttcctcttgtgagatgctggggctggtggtccagggtgcttacttctgcggccatggaggccatgagccaccaccctgttgctgtagccaaattcgttgtcataccaggaaa

SEQ ID NO: 922 - RNA, 150 nt, synthetic construct
  source 1..150: mol_type = other RNA
tggcagggactccccagcagtgagggtctcctcttcctagatacgctcagctggggctggtggttcagggggcttactccttggcagccatgtggtacaggaggtgtcccaccaacctgttgctgtagccaaattcgttgtcataccagg

SEQ ID NO: 923 - RNA, 149 nt, synthetic construct
  source 1..149: mol_type = other RNA
tggcagggactccccagcagtgagggtctctctcttcctcttgtgctcttgctggggctggtgtcagtggtctcactccttggaggccatgggggccatgaggtccaccaccctgttgctgtagccaaattcgttgtcataccaggaaa

SEQ ID NO: 924 - RNA, 150 nt, synthetic construct
  source 1..150: mol_type = other RNA
tggcagggactccccagcagtgagggtctctctcttcctcttgtgatcttgctggggctggtggtccaggagtcttacttcttggaggccatgtaccaggggccatgaggtccaccaccctgttgctgtagccaaattcgttgtcatacc

SEQ ID NO: 925 - RNA, 150 nt, synthetic construct
  source 1..150: mol_type = other RNA
tggcagggactccccagcagtgagggtctctctcttcctcttgtgctcttgctggggctgttgttccatggatctcactccgatcgaggccatgtgggccatgaggtccaccaccctgttgctgtagccaaattcgttgtcataccagga

SEQ ID NO: 926 - RNA, 151 nt, synthetic construct
  source 1..151: mol_type = other RNA
tggcagggactccccagcagtgagggtctctctcttcctcttgtgctcttgctggggctggtggtccagggttctcactccttggaggccagatgggccatgaggtccaccaccctgttgctgtagccaaattcgttgtcataccaggaaa

SEQ ID NO: 927 - RNA, 151 nt, synthetic construct
  source 1..151: mol_type = other RNA
tggcagggactccccagcagtgagggtctctctcttcctcttgtgctcttgctggggcttgtggtccaggggtcttactcctgggaggccatatgggccatgaggtccaccaccctgttgctgtagccaaattcgttgtcataccaggaaa

SEQ ID NO: 928 - RNA, 149 nt, synthetic construct
  source 1..149: mol_type = other RNA
tggcagggactccccagcagtgagggtctcgctcgctattgtgctcttgctggggcgggttatccaggggtctcaatcagtggaggccgtgtgggccattcggtccaccaccctgttgctgtagccaaattcgttgtcataccaggaaa

SEQ ID NO: 929 - RNA, 150 nt, synthetic construct
  source 1..150: mol_type = other RNA
tggcagggactccccagcagtgagggtctctctctgtcagtcttgtgatctttctggggctggtggttcaggggtctcactccttggaggtcatgtgggccatgaggtccaccaccctgttgctgtagccaaattcgttgtcataccagg

SEQ ID NO: 930 - RNA, 151 nt, synthetic construct
  source 1..151: mol_type = other RNA
tggcagggactccccagcagtgagggtctctctcttcctcttgtgctcttgctggggctggtggtcccgggatcttactccttggaggccatgtgggcaatgaggtccaccaccctgttgctgtagccaaattcgttgtcataccaggaaa

SEQ ID NO: 931 - RNA, 150 nt, synthetic construct
  source 1..150: mol_type = other RNA
tggcagggactccccagcagtgagggtctctactttctttgattcatctggctggggctggtggtccctgggtctcactccttggaggccagttgggaagctatgaggtccaccaccctgttgctgtagccaaattcgttgtcataccag

SEQ ID NO: 932 - RNA, 150 nt, synthetic construct
  source 1..150: mol_type = other RNA
tggcagggactccccagcagtgagggtctcgctcttactcttgtgagctggctggggctgttgttccatggatctcactccgatcgaggccatgtgggttatgaggtccaccaccctgttgctgtagccaaattcgttgtcataccagga

SEQ ID NO: 933 - RNA, 150 nt, synthetic construct
  source 1..150: mol_type = other RNA
tggcagggactccccagcagtgagggtctctctcttcctcttgtgctcttggctggggctggtgggaaaggggtctcactcctttggggccatgtgggccatgaggtccaccaccctgttgctgtagccaaattcgttgtcataccagga

SEQ ID NO: 934 - RNA, 150 nt, synthetic construct
  source 1..150: mol_type = other RNA
tggcagggactccccagcagtgagggtctctctcttcctcttgtgctattgagggtctgttggtccaggggtctcactcattgggggccagaggttccatgaggtccaccaccctgttgctgtagccaaattcgttgtcataccaggaaa

SEQ ID NO: 935 - RNA, 151 nt, synthetic construct
  source 1..151: mol_type = other RNA
tggcagggactccccagcagtgagggtctctctcttcctcttgtgctcttgctggggctggtgtgccaggggtctcaatccttggaggccatgtgggccatgaggtccaccaccctgttgctgtagccaaattcgttgtcataccaggaaa

SEQ ID NO: 936 - RNA, 151 nt, synthetic construct
  source 1..151: mol_type = other RNA
tggcagggactccccagcagtgagggtctctctcttcctcttgtgcgattactagggctggtgtgccaggggtctcaatccttggaggccatgtgggccatgaggtccaccaccctgttgctgtagccaaattcgttgtcataccaggaaa

SEQ ID NO: 937 - RNA, 150 nt, synthetic construct
  source 1..150: mol_type = other RNA
tggcagggactccccagcagtgagggtctctctcttcctcttgtgctcgtggtggcactggtggccaggggtctcactccttggaggccatgtgggacatgaggtccaccaccctgttgctgtagccaaattcgttgtcataccaggaaa

SEQ ID NO: 938 - RNA, 151 nt, synthetic construct
  source 1..151: mol_type = other RNA
tggcagggactccccagcagtgagggtctctctattcctctggtgctcttgctggagctggttatccaggggtctcactccttggaggtcctgtgagccatgagggccaccaacctgttgctgtagccaaattcgttgtcataccaggaaa

SEQ ID NO: 939 - RNA, 149 nt, synthetic construct
  source 1..149: mol_type = other RNA
tggcagggactccccagcagtgagggtctctatctttatatctgcttggctggggctggtggtccatgggtctcactccttgtaggccaggtaggacatgaggtccaccaccctgttgctgtagccaaattcgttgtcataccaggaaa

SEQ ID NO: 940 - RNA, 151 nt, synthetic construct
  source 1..151: mol_type = other RNA
tggcagggactccccagcagtgagggtctctcgattcagcttcgtgctcttgctgtggatggtgggacagggtcgtcactacttggaggacatgtgggccatgagcgccaccaactgttgctgtagccaaattcgttgtcataccaggaaa

SEQ ID NO: 941 - RNA, 151 nt, synthetic construct
  source 1..151: mol_type = other RNA
tggcagggactccccagcagtgagggtctctctcttcctcttgtgtgcgggctggggctggtggtccagggatcttagtccgtgggggccatgtggtccatgaggtccaccaccctgttgctgtagccaaattcgttgtcataccaggaaa

SEQ ID NO: 942 - RNA, 150 nt, synthetic construct
  source 1..150: mol_type = other RNA
tggcagggactccccagcagtgagggtctctctcttcctcttgtgctcttgctggggctggtggtccagtggtctcactccttggagtctcatgtgtgccatgaggtccaccaccctgttgctgtagccaaattcgttgtcataccagga

SEQ ID NO: 943 - RNA, 150 nt, synthetic construct
  source 1..150: mol_type = other RNA
tggcagggactccccagcagtgagggtctctctcttcctcttgtgctcttgctggggctggtggtccaggggtcttactccttggaggccagaggtggccatgaggtccaccaccctgttgctgtagccaaattcgttgtcataccagga

SEQ ID NO: 944 - RNA, 151 nt, synthetic construct
  source 1..151: mol_type = other RNA
tggcagggactccccagcagtgagggtctcactattcctcgtgttctctggctggggatggttggccaggggtttcactacttggaggccaggtgggccgtgcggttcaccaccttgttgctgtagccaaattcgttgtcataccaggaaa

SEQ ID NO: 945 - RNA, 151 nt, synthetic construct
  source 1..151: mol_type = other RNA
tggcagggactccccagcagtgagggtctctctcttcctcttgtgctcttgctggggctggtggtccacgggtctcactcctttgagtccatgtgggccatgaggtccaccaccctgttgctgtagccaaattcgttgtcataccaggaaa

SEQ ID NO: 946 - RNA, 149 nt, synthetic construct
  source 1..149: mol_type = other RNA
tggcagggactccccagcagtgagggtctctctcttcctcttgtgctcttgctggggctggtggtcacggggtctcacaatggaggccaatggggccatgaggtccaccaccctgttgctgtagccaaattcgttgtcataccaggaaa

SEQ ID NO: 947 - RNA, 151 nt, synthetic construct
  source 1..151: mol_type = other RNA
tggcagggactccccagcagtgagggtctctctcttcctcttgtgctcttgctggggctggtggtccagggtacttactccttggaggccatttgggccatgaggtccaccaccctgttgctgtagccaaattcgttgtcataccaggaaa

SEQ ID NO: 948 - RNA, 150 nt, synthetic construct
  source 1..150: mol_type = other RNA
tggcagggactccccagcagtgagggtctctctattcttcttgtgctattgctggggctggtgatccgtggttctcactccttcctcgaggctatgtgagccatgcgggtcaccatcctgttgctgtagccaaattcgttgtcataccag

SEQ ID NO: 949 - RNA, 151 nt, synthetic construct
  source 1..151: mol_type = other RNA
tggcagggactccccagcagtgagggtctctctcttcctcttgtgttcttgctggggctggtggtccagggttcttactccttggaggccagatggggcatgaggtccaccaccctgttgctgtagccaaattcgttgtcataccaggaaa

SEQ ID NO: 950 - RNA, 151 nt, synthetic construct
  source 1..151: mol_type = other RNA
tggcagggactccccagcagtgagggtctctcgcttcctcttgtgttcgtgctggggctggtggtccagggctcttactccttggaggccatgggggccatgaggtccaccaccctgttgctgtagccaaattcgttgtcataccaggaaa

SEQ ID NO: 951 - RNA, 150 nt, synthetic construct
  source 1..150: mol_type = other RNA
tggcagggactccccagcagtgagggtctctctcttactcttgtgctcttggctggggctggtgggaaaggggtctcactcctttggggccatgtgggccatgaggtccaccacaatgttgctgtagccaaattcgttgtcataccagga

SEQ ID NO: 952 - RNA, 150 nt, synthetic construct
  source 1..150: mol_type = other RNA
tggcagggactccccagcagtgagggtctctctcttcctcttgtgctcagctggggctggtggttcagggggcttactccttggcagccatgtggtacaggaggtccaccaccctgttgctgtagccaaattcgttgtcataccaggaaa

SEQ ID NO: 953 - RNA, 149 nt, synthetic construct
  source 1..149: mol_type = other RNA
tggcagggactccccagcagtgagggtctctctatggcttgtgctcgtgcgaggactggtggactaggggtctcactacttggtggttatggtggccatgaggtcccccaccctgttgctgtagccaaattcgttgtcataccaggaaa

SEQ ID NO: 954 - RNA, 151 nt, synthetic construct
  source 1..151: mol_type = other RNA
tggcagggactccccagcagtgagggtctctctcttcctcttgtgctcttgctggggctggtgtccaaggggtcttactcgtgaccggccatgtgggccatgaggtccaccaccctgttgctgtagccaaattcgttgtcataccaggaaa

SEQ ID NO: 955 - RNA, 151 nt, synthetic construct
  source 1..151: mol_type = other RNA
tggcagggactccccagcagtgagggtctctctcttcctcttgtgctcttgctggggctggtggtcccgggggctcaatccttggaggccatgtgggccatgaggtccaccaccctgttgctgtagccaaattcgttgtcataccaggaaa

SEQ ID NO: 956 - RNA, 150 nt, synthetic construct
  source 1..150: mol_type = other RNA
tggcagggactccccagcagtgagggtctctctcttcctcttgtgatcttgcttaggatggtggtccaggggtctcactcttggaggccatggggttcatgaggtccaccaccctgttgctgtagccaaattcgttgtcataccaggaaa

SEQ ID NO: 957 - RNA, 151 nt, synthetic construct
  source 1..151: mol_type = other RNA
tggcagggactccccagcagtgagggtctctctcttcctcttgtgctcgtctagggctggaggtcccggaggtcttactccttggccatggtgggcaccatgtggtccaccaccctgttgctgtagccaaattcgttgtcataccaggaaa

SEQ ID NO: 958 - RNA, 151 nt, synthetic construct
  source 1..151: mol_type = other RNA
tggcagggactccccagcagtgagggtctctctcttcctcttgtgctcttgctggggctggtggtccagggggcttactcctgggaggccataggggccatgaggtccaccaccctgttgctgtagccaaattcgttgtcataccaggaaa

SEQ ID NO: 959 - RNA, 151 nt, synthetic construct
  source 1..151: mol_type = other RNA
tggcagggactccccagcagtgagggtctcttgtttcctagtgtttcttggctgggtctggtgatccaggggtcttactccggggaggccatatgggcaatgaggtccaccaccctgttgctgtagccaaattcgttgtcataccaggaaa

SEQ ID NO: 960 - RNA, 151 nt, synthetic construct
  source 1..151: mol_type = other RNA
tggcagggactccccagcagtgagggtctctctcttcctcttgtgctcttgctggggttgggggtccaggggtcgcactcctttccggccatgtgggccatgaggtccaccaccctgttgctgtagccaaattcgttgtcataccaggaaa

SEQ ID NO: 961 - RNA, 151 nt, synthetic construct
  source 1..151: mol_type = other RNA
tggcagggactccccagcagtgagggtctctctcttcctcttgtgctctggctggggatggttggccaggggtttcactacttggaggccaggtgggccgtgcggtccaccaccctgttgctgtagccaaattcgttgtcataccaggaaa

SEQ ID NO: 962 - RNA, 151 nt, synthetic construct
  source 1..151: mol_type = other RNA
tggcagggactccccagcagtgagggtctctctcttcctcttgtgctcttgctggggctggtggtccatgggtcttactccttgtaggccaggtaggccatgaggtccaccaccctgttgctgtagccaaattcgttgtcataccaggaaa

SEQ ID NO: 963 - RNA, 151 nt, synthetic construct
  source 1..151: mol_type = other RNA
tggcagggactccccagcagtgagggtctctctcttcctcttgtgatctggctggggctggtggtccatgggtcttactccgtggaggcaatgtgggctatgaggtccaccaccctgttgctgtagccaaattcgttgtcataccaggaaa

SEQ ID NO: 964 - RNA, 150 nt, synthetic construct
  source 1..150: mol_type = other RNA
tggcagggactccccagcagtgagggtctctctcgtccatacatgttctcttgctggggctgggggtccagtggtctcactcctgggaggccagggaggttatgaggtccaccaccctgttgctgtagccaaattcgttgtcataccagg

SEQ ID NO: 965 - RNA, 150 nt, synthetic construct
  source 1..150: mol_type = other RNA
tggcagggactccccagcagtgagggtctctagcttcatcttgttatttggctgaggatggtggtccagtggtcttactccttggaggccatcaggccctgaggtccaccaccctgttgctgtagccaaattcgttgtcataccaggaaa

SEQ ID NO: 966 - RNA, 151 nt, synthetic construct
  source 1..151: mol_type = other RNA
tggcagggactccccagcagtgagggtctctctcttcctcttgtgctcttgctggggctgttggttcagggttctcactcagatgaggccatatgggccatgaggtccaccaccctgttgctgtagccaaattcgttgtcataccaggaaa

SEQ ID NO: 967 - RNA, 150 nt, synthetic construct
  source 1..150: mol_type = other RNA
tggcagggactccccagcagtgagggtctctctcttcctcttgtgctcttgctggggatggtggtccagagggtcttactaattggcggcgatgtgggccatgaggtccaccaccctgttgctgtagccaaattcgttgtcataccagga

SEQ ID NO: 968 - RNA, 151 nt, synthetic construct
  source 1..151: mol_type = other RNA
tggcagggactccccagcagtgagggtctctctcttcctcttgtgctcttgctggggctagtggtccaggggtctcacgcctgggagtccatatgggccatgaggtccaccaccctgttgctgtagccaaattcgttgtcataccaggaaa

SEQ ID NO: 969 - RNA, 151 nt, synthetic construct
  source 1..151: mol_type = other RNA
tggcagggactccccagcagtgagggtctctctcttcctcttgtgctcttgctggggctgttggtccatgggtcttactccttggaggccatgtgggccatgaggtccaccaccctgttgctgtagccaaattcgttgtcataccaggaaa

SEQ ID NO: 970 - RNA, 151 nt, synthetic construct
  source 1..151: mol_type = other RNA
tggcagggactccccagcagtgagggtctctctcttcctcttgtgctcttgctggggctggtggtccaggggtcttactccttggaggccatgtgggcaatgaggtccaccaccctgttgctgtagccaaattcgttgtcataccaggaaa

SEQ ID NO: 971 - RNA, 151 nt, synthetic construct
  source 1..151: mol_type = other RNA
tggcagggactccccagcagtgagggtctctcgattcttcttgtgatcttgctggggctggtggtccaggggtcttacttcttggaggccatgttggtaatgaggtccaccaccctgttgctgtagccaaattcgttgtcataccaggaaa

SEQ ID NO: 972 - RNA, 149 nt, synthetic construct
  source 1..149: mol_type = other RNA
tggcagggactccccagcagtgagggtctctctcttcctcttgtgctcttgctggggctggtggtccagggtgctcacttctgcggccatggaggccatgaggtccaccaccctgttgctgtagccaaattcgttgtcataccaggaaa

SEQ ID NO: 973 - RNA, 150 nt, synthetic construct
  source 1..150: mol_type = other RNA
tggcagggactccccagcagtgagggtctctcacttactctttccatctttgcttgggttggtggtgtggggtttcactatacccttggaggtcctgttgtccatgcggggtcacaccctgttgctgtagccaaattcgttgtcatacca

SEQ ID NO: 974 - RNA, 150 nt, synthetic construct
  source 1..150: mol_type = other RNA
tggcagggactccccagcagtgagggtctctatctcctcttgtgcgcttgctatggctggtggtccaggggtctcacttctgacaaagaggccatgtgggctatggagtccaccacactcttgctgtagccaaattcgttgtcataccag

SEQ ID NO: 975 - RNA, 150 nt, synthetic construct
  source 1..150: mol_type = other RNA
tggcagggactccccagcagtgagggtctctctcttcctcttgtgctcttgctggggctggtggtccaggagtcttacttcttggaggccatgtaccaggggccatgaggtccaccaccctgttgctgtagccaaattcgttgtcatacc

SEQ ID NO: 976 - RNA, 143 nt, synthetic construct
  source 1..143: mol_type = other RNA
tggcagggactccccagcagtgagggtctctctcttcctcgtgtgctctggttggggctggtggtccaggggtctcactcattggaggggccatgaggtccaccaagcattgctgtagccaaattcgttgtcataccaggaaa

SEQ ID NO: 977 - RNA, 150 nt, synthetic construct
  source 1..150: mol_type = other RNA
tggcagggactccccagcagtgagggtctctctcttcctcttgtgcatctggctgaggctggtggtccaggggtcttactccttggaggccagaggtgctatgaggtccaccaccctgttgctgtagccaaattcgttgtcataccagga

SEQ ID NO: 978 - RNA, 150 nt, synthetic construct
  source 1..150: mol_type = other RNA
tggcagggactccccagcagtgagggtctctctcttcctcttgtgctcttgctggagctggtggtccaggggtctcacctacgtggaggccaggtgggacaatgaggtccaccaccctgttgctgtagccaaattcgttgtcataccagg

SEQ ID NO: 979 - RNA, 151 nt, synthetic construct
  source 1..151: mol_type = other RNA
tggcagggactccccagcagtgagggtctctctcttcctcttgtgttcttgctggggagggtgggccaagggtctcactccttggaggaacggtgggccatgcggtccaccaccctgttgctgtagccaaattcgttgtcataccaggaaa

SEQ ID NO: 980 - RNA, 150 nt, synthetic construct
  source 1..150: mol_type = other RNA
tggcagggactccccagcagtgagggtctctctcttcctcttgtgatcttgcttaggatggtggtccaggggtcttactcttggaggccatggggttcatgaggtccaccaccctgttgctgtagccaaattcgttgtcataccaggaaa

SEQ ID NO: 981 - RNA, 151 nt, synthetic construct
  source 1..151: mol_type = other RNA
tggcagggactccccagcagtgagggtctctctcttcctcttgtgctcttgctggggatggttggccaggggtttcactacttggaggccaggtgggccatgaggtccaccaccctgttgctgtagccaaattcgttgtcataccaggaaa

SEQ ID NO: 982 - RNA, 151 nt, synthetic construct
  source 1..151: mol_type = other RNA
tggcagggactccccagcagtgagggtctctctattctctcttgtgctcttgctggggctggtgggccagtgggctcactccttggaggtcctgtgaccctgagggccatcaacctgttgctgtagccaaattcgttgtcataccaggaaa

SEQ ID NO: 983 - RNA, 151 nt, synthetic construct
  source 1..151: mol_type = other RNA
tggcagggactccccagcagtgagggtctctctcttcctcttgtgctcttgctggggctggtggtcaaggggtcttactccttggaggccatgtgggccatgaggtccaccaccctgttgctgtagccaaattcgttgtcataccaggaaa

SEQ ID NO: 984 - RNA, 151 nt, synthetic construct
  source 1..151: mol_type = other RNA
tggcagggactccccagcagtgagggtctctctcttcctcttgtgatcttgctggggctggtggtccaggggtcttacttcttggaggccatgttggtaatgaggtccaccaccctgttgctgtagccaaattcgttgtcataccaggaaa

SEQ ID NO: 985 - RNA, 151 nt, synthetic construct
  source 1..151: mol_type = other RNA
tggcagggactccccagcagtgagggtctctctcttcctcttgtgctcttgctggggctggtgatccagggggcttactccttggaggccatgtaggccatgaggtccaccaccctgttgctgtagccaaattcgttgtcataccaggaaa

SEQ ID NO: 986 - RNA, 151 nt, synthetic construct
  source 1..151: mol_type = other RNA
tggcagggactccccagcagtgagggtctctctcttcctcttgtgtcttggctgggtctggtgatccaggggtcttactccggggaggccatatgggcaatgaggtccaccaccctgttgctgtagccaaattcgttgtcataccaggaaa

SEQ ID NO: 987 - RNA, 151 nt, synthetic construct
  source 1..151: mol_type = other RNA
tggcagggactccccagcagtgagggtctctctcttcctcttgtgctcttgcttgggcttgtggtccatggggcttacttcttggcggccagatgggacatgaggtccaccaccctgttgctgtagccaaattcgttgtcataccaggaaa

SEQ ID NO: 988 - RNA, 150 nt, synthetic construct
  source 1..150: mol_type = other RNA
tggcagggactccccagcagtgagggtctctctcttcctcttgtgctcttgctggggatggtggtccagagggtctcactaattggcggcgatgtgggccatgaggtccaccaccctgttgctgtagccaaattcgttgtcataccagga

SEQ ID NO: 989 - RNA, 151 nt, synthetic construct
  source 1..151: mol_type = other RNA
tggcagggactccccagcagtgagggtctctctcttcctcttgtgctctggcttgggctggtggtcaaggggtcttactccttggaggccatgtgggccatgaggtccaccaccctgttgctgtagccaaattcgttgtcataccaggaaa

SEQ ID NO: 990 - RNA, 150 nt, synthetic construct
  source 1..150: mol_type = other RNA
tggcagggactccccagcagtgagggtctctttctttctcttgtgctcttactggggctggtggtcccgggggctcaatccttggaggccatgtggaccatgaggtctcaccaccctgttggctgtagccaaattcgttgtcataccagg

SEQ ID NO: 991 - RNA, 150 nt, synthetic construct
  source 1..150: mol_type = other RNA
tggcagggactccccagcagtgagggtctctctcttcctcttgtgctattgctggggctggtggtcagtccagtctcactcattggaggccatgtgggccattaggtccaccaccctgttgctgtagccaaattcgttgtcataccagga

SEQ ID NO: 992 - RNA, 150 nt, synthetic construct
  source 1..150: mol_type = other RNA
tggcagggactccccagcagtgagggtctctctcttcctagtatgtgtttcttgctggggctggtggtccatgggtcttactcattggaggccatgtggtacatgaggtccaccaccctgttgctgtagccaaattcgttgtcataccag

SEQ ID NO: 993 - RNA, 151 nt, synthetic construct
  source 1..151: mol_type = other RNA
tggcagggactccccagcagtgagggtctctcgcttcttcgtgttctcttgcttgggcttgtggtccatggggctcacttcttggcggccagatgggacatgaggtccaccaccctgttgctgtagccaaattcgttgtcataccaggaaa

SEQ ID NO: 994 - RNA, 150 nt, synthetic construct
  source 1..150: mol_type = other RNA
tggcagggactccccagcagtgagggtctctctcttcctcttgtgctcttgctggtcgcttgtgggacaggtagctcactcctttggggccatgtgggccatgaggtccaccaccctgttgctgtagccaaattcgttgtcataccagga

SEQ ID NO: 995 - RNA, 151 nt, synthetic construct
  source 1..151: mol_type = other RNA
tggcagggactccccagcagtgagggtctctctcttcctcttgtgctcgtgctgaggctggtggtccaggggtcttactccgtggaggccatgtggggcctgaggtccaccaccctgttgctgtagccaaattcgttgtcataccaggaaa

SEQ ID NO: 996 - RNA, 151 nt, synthetic construct
  source 1..151: mol_type = other RNA
tggcagggactccccagcagtgagggtctctctcttcctcttgtgctcttgctggggctggtggtccaggggtcttactcttgtcaggccatgtaggccatgaggtccaccaccctgttgctgtagccaaattcgttgtcataccaggaaa

SEQ ID NO: 997 - RNA, 151 nt, synthetic construct
  source 1..151: mol_type = other RNA
tggcagggactccccagcagtgagggtctctctcttcctcttgtgatcgggctggggcgggtggtccaggggtcttacttcttggaggccatgtgggccatgaggtccaccaccctgttgctgtagccaaattcgttgtcataccaggaaa

SEQ ID NO: 998 - RNA, 150 nt, synthetic construct
  source 1..150: mol_type = other RNA
tggcagggactccccagcagtgagggtctctctcttcctcttgtgctcttgatggggctggtggtccaggggtcttactccttgaaggccatatggcgctatgaggtccaccaccctgttgctgtagccaaattcgttgtcataccagga

SEQ ID NO: 999 - RNA, 151 nt, synthetic construct
  source 1..151: mol_type = other RNA
tggcagggactccccagcagtgagggtctctctcttcctcgtgttatcttgctggggcgtgttagccagggggttcacttcttggaggcccggtgggccattaaggccaccaccctgttgctgtagccaaattcgttgtcataccaggaaa

SEQ ID NO: 1000 - RNA, 150 nt, synthetic construct
  source 1..150: mol_type = other RNA
tggcagggactccccagcagtgagggtctctctcttcctcttgtgctcttgcttgggggacatggtgggacaggtgtctcactccttggatgccatgtgggccatgagttccaccaccctgttgctgtagccaaattcgttgtcatacca

SEQ ID NO: 1001 - RNA, 151 nt, synthetic construct
  source 1..151: mol_type = other RNA
tggcagggactccccagcagtgagggtctctctcttcctcttgtgctcttgctggggctggggggccaggggtcttacgtctgggaggccctgtgggccatgaggtccaccaccctgttgctgtagccaaattcgttgtcataccaggaaa

SEQ ID NO: 1002 - RNA, 150 nt, synthetic construct
  source 1..150: mol_type = other RNA
tggcagggactccccagcagtgagggtctctctcttcctcttgtgatttggctgaggatggtggtccagtggtcttactccttggaggccatcaggccctgaggtccaccaccctgttgctgtagccaaattcgttgtcataccaggaaa

SEQ ID NO: 1003 - RNA, 151 nt, synthetic construct
  source 1..151: mol_type = other RNA
tggcagggactccccagcagtgagggtctctctcttcctcttgtgctcttgctggggctggtgggggtcttactccttggaggccatgcgcctgaggccatgaggtccaccaccctgttgctgtagccaaattcgttgtcataccaggaaa

SEQ ID NO: 1004 - RNA, 151 nt, synthetic construct
  source 1..151: mol_type = other RNA
tggcagggactccccagcagtgagggtctctctcttcctcttgtgactgggctggggctgttggtccatgggtcttactccttggaggccatgtgggttatgaggtccaccaccctgttgctgtagccaaattcgttgtcataccaggaaa

SEQ ID NO: 1005 - RNA, 151 nt, synthetic construct
  source 1..151: mol_type = other RNA
tggcagggactccccagcagtgagggtctctctcttcctcttgtgctcttgctgtggatggtgggacagggtcgtcactacttggaggacatgtgggccatgagcgccaccaccctgttgctgtagccaaattcgttgtcataccaggaaa

SEQ ID NO: 1006 - RNA, 151 nt, synthetic construct
  source 1..151: mol_type = other RNA
tggcagggactccccagcagtgagggtctctctcttcctcttgtgctcttgctggggcgggttatccaggggtctcaatcagtggaggccgtgtgggccatgaggtccaccaccctgttgctgtagccaaattcgttgtcataccaggaaa

SEQ ID NO: 1007 - RNA, 148 nt, synthetic construct
  source 1..148: mol_type = other RNA
tggcagggactccccagcagtgagggtctctctcttcctcttgtgttctgaggctgttggtccaggggtctcacctccttggaggccgtgggggacgtgaggtccaccaccctgttgctgtagccaaattcgttgtcataccaggaaa

SEQ ID NO: 1008 - RNA, 151 nt, synthetic construct
  source 1..151: mol_type = other RNA
tggcagggactccccagcagtgagggtctctctcttcctcttgtgactgagcgggggctggtggtccaggggtctcactcagtggaggccatgtgggacatgaggtccaccaccctgttgctgtagccaaattcgttgtcataccaggaaa

SEQ ID NO: 1009 - RNA, 150 nt, synthetic construct
  source 1..150: mol_type = other RNA
tggcagggactccccagcagtgagggtctctctcttcctcttgtgcctcttgctggggctggtggtccaggggtctcactcctttccggccagagaggacctgaggtccaccaccctgttgctgtagccaaattcgttgtcataccagga

SEQ ID NO: 1010 - RNA, 151 nt, synthetic construct
  source 1..151: mol_type = other RNA
tggcagggactccccagcagtgagggtctctctcttcctcttgtgctcttgctggagcggttggtgcaggggtctctttccttggaggcaatgtgggtcatgaggtccaccaccctgttgctgtagccaaattcgttgtcataccaggaaa

SEQ ID NO: 1011 - RNA, 151 nt, synthetic construct
  source 1..151: mol_type = other RNA
tggcagggactccccagcagtgagggtctctctcttcctcttgtgctcttgctggggctggtgggggtctcactccttggaggccatgcgcctgaggccatgaggtccaccaccctgttgctgtagccaaattcgttgtcataccaggaaa

SEQ ID NO: 1012 - RNA, 151 nt, synthetic construct
  source 1..151: mol_type = other RNA
tggcagggactccccagcagtgagggtctctctcttcctcgtgtgctcgtgctggggatggttgttcaggggtctcgctcctttgaggacatgtgggtaatgcgggccacccccctgttgctgtagccaaattcgttgtcataccaggaaa

SEQ ID NO: 1013 - RNA, 151 nt, synthetic construct
  source 1..151: mol_type = other RNA
tggcagggactccccagcagtgagggtctctctcttcctcttgtgctcttgctggggctggtgatccaggtgtctcaatccttggaggccatgtgggccatgaggtccaccaccctgttgctgtagccaaattcgttgtcataccaggaaa

SEQ ID NO: 1014 - RNA, 151 nt, synthetic construct
  source 1..151: mol_type = other RNA
tggcagggactccccagcagtgagggtctctcgcttcctctggtactcttgctggagcggttggtgcaggggtctctttccttggaggcaatgtgggtcatgaggtccaccacccggttgctgtagccaaattcgttgtcataccaggaaa

SEQ ID NO: 1015 - RNA, 150 nt, synthetic construct
  source 1..150: mol_type = other RNA
tggcagggactccccagcagtgagggtctctctcttcctcttgtgctcttgctggggctggtggttcaggggttgactccttggaggccatgaccgccatgaggtccaccaccctgttgctgtagccaaattcgttgtcataccaggaaa

SEQ ID NO: 1016 - RNA, 151 nt, synthetic construct
  source 1..151: mol_type = other RNA
tggcagggactccccagcagtgagggtctctctcttcctcttgtgctcttgctgtagctggtggtacaggtatctcaatccttggaggccatttgggccatgaggtccaccaccctgttgctgtagccaaattcgttgtcataccaggaaa

SEQ ID NO: 1017 - RNA, 150 nt, synthetic construct
  source 1..150: mol_type = other RNA
tggcagggactccccagcagtgagggtctctctcttcctcttgtgcatctggctgaggctggtggtccaggggtctcactccttggaggccagaggtgctatgaggtccaccaccctgttgctgtagccaaattcgttgtcataccagga

SEQ ID NO: 1018 - RNA, 150 nt, synthetic construct
  source 1..150: mol_type = other RNA
tggcagggactccccagcagtgagggtctctcacttactctttccatctttgtttgggttggggtccgggggtctcactatacccttggaggtcatgttcatgagagtgtatcccaccctgttgctgtagccaaattcgttgtcatacca

SEQ ID NO: 1019 - RNA, 151 nt, synthetic construct
  source 1..151: mol_type = other RNA
tggcagggactccccagcagtgagggtctctctcttcctcttgtgatcttgctggggctggtggtccaggggtcttactccgtggaagccatataggttaggaggtccaccaccctgttgctgtagccaaattcgttgtcataccaggaaa

SEQ ID NO: 1020 - RNA, 151 nt, synthetic construct
  source 1..151: mol_type = other RNA
tggcagggactccccagcagtgagggtctctctcttcctcttgtgctcttgctggggctggtggtccaggggtcttacttcttggaggccatgttggccatgaggtccaccaccctgttgctgtagccaaattcgttgtcataccaggaaa

SEQ ID NO: 1021 - RNA, 150 nt, synthetic construct
  source 1..150: mol_type = other RNA
tggcagggactccccagcagtgagggtctctttcttcctcgtgttatctggcttgggcttgtggtccctggggagcacttcttggcggtaatgcacctgaggccatgaggtccaccaccctgttgctgtagccaaattcgttgtcatacc

SEQ ID NO: 1022 - RNA, 150 nt, synthetic construct
  source 1..150: mol_type = other RNA
tggcagggactccccagcagtgagggtctctctcttcctcttgtgatctggctggggctggtggtccctgggtcttactccttggaggccagttgggaagctatgaggtccaccaccctgttgctgtagccaaattcgttgtcataccag

SEQ ID NO: 1023 - RNA, 149 nt, synthetic construct
  source 1..149: mol_type = other RNA
tggcagggactccccagcagtgagggtctctcttaatcttgtgatcgggctggggcgggtggtccaggggtcttacttcttggaggccatgtgggccatgaggtccaccaccctgttgctgtagccaaattcgttgtcataccaggaaa

SEQ ID NO: 1024 - RNA, 150 nt, synthetic construct
  source 1..150: mol_type = other RNA
tggcagggactccccagcagtgagggtctctcgcttcctcttgtgctattgctggggctggtggtccacgggtcgcactcctgggaggccatgtgggttatgagtgtccaccaccctgttgctgtagccaaattcgttgtcataccagga

SEQ ID NO: 1025 - RNA, 146 nt, synthetic construct
  source 1..146: mol_type = other RNA
tggcagggactccccagcagtgagggtctctcttcctcttgtgttctgaggctgttggtccaggggtcttacctccttggaggccgtgggggacgtgaggtccaccaccctgttgctgtagccaaattcgttgtcataccaggaaa

SEQ ID NO: 1026 - RNA, 151 nt, synthetic construct
  source 1..151: mol_type = other RNA
tggcagggactccccagcagtgagggtctctacttcctgcttgtgatcgggctgaggcttgtggtccaggggtcttactccttggaggccatgggggctatgaggtccaccaccctgttgctgtagccaaattcgttgtcataccaggaaa

SEQ ID NO: 1027 - RNA, 151 nt, synthetic construct
  source 1..151: mol_type = other RNA
tggcagggactccccagcagtgagggtctctctcttcctcttgtgctcttgctggggcgggttatccaggggtctcaatcagtggaggccgtgtgggccattcggtccaccaccctgttgctgtagccaaattcgttgtcataccaggaaa

SEQ ID NO: 1028 - RNA, 150 nt, synthetic construct
  source 1..150: mol_type = other RNA
tggcagggactccccagcagtgagggtctctctcttcctcttgtgctcttgctgttcgcttgtgggacaggtagctcactcctttggggccatgtgggccatgaggtccaccaccctgttgctgtagccaaattcgttgtcataccagga

SEQ ID NO: 1029 - RNA, 151 nt, synthetic construct
  source 1..151: mol_type = other RNA
tggcagggactccccagcagtgagggtctctctcttcctcttgtgctcttgctggggcgggtggtccaggggtcttactccttggaagccatataggccatgaggtccaccaccctgttgctgtagccaaattcgttgtcataccaggaaa

SEQ ID NO: 1030 - RNA, 150 nt, synthetic construct
  source 1..150: mol_type = other RNA
tggcagggactccccagcagtgagggtctctctcttcctcttgtgctcttgctgaggctggtggtccaggggtcttactccttggaggccagaggggttaatgaggtccaccaccctgttgctgtagccaaattcgttgtcataccagga

SEQ ID NO: 1031 - RNA, 151 nt, synthetic construct
  source 1..151: mol_type = other RNA
tggcagggactccccagcagtgagggtctctctcttcctcttgtgctcttcctggggttgggggtccaggggtcgtactcctttccggccatgtgggacatgaggtccaccaccctgttgctgtagccaaattcgttgtcataccaggaaa

SEQ ID NO: 1032 - RNA, 151 nt, synthetic construct
  source 1..151: mol_type = other RNA
tggcagggactccccagcagtgagggtctctctcttcctcttgtgctcttgctggggcttgtggtccatggggcttacttcttggcggccaggggggccatgaggtccaccaccctgttgctgtagccaaattcgttgtcataccaggaaa

SEQ ID NO: 1033 - RNA, 151 nt, synthetic construct
  source 1..151: mol_type = other RNA
tggcagggactccccagcagtgagggtctctctattactcgattgcttgttctggggctggtgctccagtggtttcaaaacttgtaggacatgtgggccattcggtacaccatcctgttgctgtagccaaattcgttgtcataccaggaaa

SEQ ID NO: 1034 - RNA, 150 nt, synthetic construct
  source 1..150: mol_type = other RNA
tggcagggactccccagcagtgagggtctctctcgtctgctacattgggctcgtctagggctggaggtcccggaggtcttactccttggccatggtgggcaccatgtggtccaccaccctgttgctgtagccaaattcgttgtcatacca

SEQ ID NO: 1035 - RNA, 151 nt, synthetic construct
  source 1..151: mol_type = other RNA
tggcagggactccccagcagtgagggtctctctcttcctcttgtgctcttgctggggcttgtggtccatggggcttacttcttggcggccagatgggccatgaggtccaccaccctgttgctgtagccaaattcgttgtcataccaggaaa

SEQ ID NO: 1036 - RNA, 150 nt, synthetic construct
  source 1..150: mol_type = other RNA
tggcagggactccccagcagtgagggtctctctcttcctcttgtgctcttgctggggctggtgatccgtggttctcactccttcctcgaggctatgtgagccatgaggtccaccaccctgttgctgtagccaaattcgttgtcataccag

SEQ ID NO: 1037 - RNA, 150 nt, synthetic construct
  source 1..150: mol_type = other RNA
tggcagggactccccagcagtgagggtctctctcttcctcttgtgctcttgctggagctggtggtccaggggtcttacctacgtggaggccaggtgggacaatgaggtccaccaccctgttgctgtagccaaattcgttgtcataccagg

SEQ ID NO: 1038 - RNA, 151 nt, synthetic construct
  source 1..151: mol_type = other RNA
tggcagggactccccagcagtgagggtctctctcttcctcttgtgctcttgctgtggctggtgggtcaggggtcttactttgtggaggccagatgggcagtgaggtccaccaccctgttgctgtagccaaattcgttgtcataccaggaaa

SEQ ID NO: 1039 - RNA, 151 nt, synthetic construct
  source 1..151: mol_type = other RNA
tggcagggactccccagcagtgagggtctctctcttcctcttgtgcttgtgctggagctggtggtccaggggtctcattccggggaggccatgggggtcatgaggtccaccaccctgttgctgtagccaaattcgttgtcataccaggaaa

SEQ ID NO: 1040 - RNA, 151 nt, synthetic construct
  source 1..151: mol_type = other RNA
tggcagggactccccagcagtgagggtctctctcttcctcttgtgctcgtctagggctggaggtcccggaggtctcactccttggccatggtgggcaccatgtggtccaccaccctgttgctgtagccaaattcgttgtcataccaggaaa

SEQ ID NO: 1041 - RNA, 151 nt, synthetic construct
  source 1..151: mol_type = other RNA
tggcagggactccccagcagtgagggtctctcgcttcatcttggcaccttgatggggctggtggtcacggggtctcactccttggaggccctgtgggttatgaggtccaccaccctgttgctgtagccaaattcgttgtcataccaggaaa

SEQ ID NO: 1042 - RNA, 150 nt, synthetic construct
  source 1..150: mol_type = other RNA
tggcagggactccccagcagtgagggtctctcttgtccgagcaatgattctggctggggctggtgggggtctcactccttggaggccatgcgcctgaggaccatgaggtccaccaccctgttgctgtagccaaattcgttgtcataccag

SEQ ID NO: 1043 - RNA, 150 nt, synthetic construct
  source 1..150: mol_type = other RNA
tggcagggactccccagcagtgagggtctcttgattcctcttgtgatcttgctggggctggtggtccaggagtcttacttcttggaggccatgtaccaggggccatgaggtccaccaccctgttgctgtagccaaattcgttgtcatacc

SEQ ID NO: 1044 - RNA, 151 nt, synthetic construct
  source 1..151: mol_type = other RNA
tggcagggactccccagcagtgagggtctctctcttcctcttgtgctcttgctgtggctagtggtccaggggtctcacgcctgggagtccatatgggccatgaggtccaccaccctgttgctgtagccaaattcgttgtcataccaggaaa

SEQ ID NO: 1045 - RNA, 151 nt, synthetic construct
  source 1..151: mol_type = other RNA
tggcagggactccccagcagtgagggtctctctcttcctcttgtgctcttgctggggctgttggtacatgggtcttactccgtggaggccatgtgggccatgaggtccaccaccctgttgctgtagccaaattcgttgtcataccaggaaa

SEQ ID NO: 1046 - RNA, 151 nt, synthetic construct
  source 1..151: mol_type = other RNA
tggcagggactccccagcagtgagggtctctctcttcctcttgtgacttggctgcggctggtgatccagggggcttactccttggaggccatgtaggtcatgaggtccaccaccctgttgctgtagccaaattcgttgtcataccaggaaa

SEQ ID NO: 1047 - RNA, 150 nt, synthetic construct
  source 1..150: mol_type = other RNA
tggcagggactccccagcagtgagggtctctctctcctcttgtgttcttgctggggctggtgatccaggtgtctcaatccttggaggccatgtgggccatgagggccaccaccctgttggtgtagccaaattcgttgtcataccaggaaa

SEQ ID NO: 1048 - RNA, 151 nt, synthetic construct
  source 1..151: mol_type = other RNA
tggcagggactccccagcagtgagggtctctcgcttcctcttgtgacattgcgggggctggttggccgggggtcgcactccttggcggctatgtgggcccggaggtaaaccaccctgttgctgtagccaaattcgttgtcataccaggaaa

SEQ ID NO: 1049 - RNA, 151 nt, synthetic construct
  source 1..151: mol_type = other RNA
tggcagggactccccagcagtgagggtctctctcttcctcttgtgctcttgctgggtctgttggtccaggggtcttactcattgggggccagaggtgccatgaggtccaccaccctgttgctgtagccaaattcgttgtcataccaggaaa

SEQ ID NO: 1050 - RNA, 151 nt, synthetic construct
  source 1..151: mol_type = other RNA
tggcagggactccccagcagtgagggtctctctcttcctcttgtgatcttgctggggcttgtggtccaggggtcttactcctgggaggccatatgggccatgaggtccaccaccctgttgctgtagccaaattcgttgtcataccaggaaa

SEQ ID NO: 1051 - RNA, 151 nt, synthetic construct
  source 1..151: mol_type = other RNA
tggcagggactccccagcagtgagggtctctctcttcctcttgtgctcttgctgggtctgggggtccaggggtcgcactccttggagttcatgtttgccatgaggtccaccaccctgttgctgtagccaaattcgttgtcataccaggaaa

SEQ ID NO: 1052 - RNA, 151 nt, synthetic construct
  source 1..151: mol_type = other RNA
tggcagggactccccagcagtgagggtctctcgcttcctcgtgggctcttgatggggcgggtggtccaggggtcttactccttggaagccatataggttatgaggtccaccaccctgttgctgtagccaaattcgttgtcataccaggaaa

SEQ ID NO: 1053 - RNA, 150 nt, synthetic construct
  source 1..150: mol_type = other RNA
tggcagggactccccagcagtgagggtctctctcttcctcttgtgctcttgctggagctggtggtccaggggtcttacctacgtggaggccaggtgggccatgaggtccaccaccctgttgctgtagccaaattcgttgtcataccagga

SEQ ID NO: 1054 - RNA, 150 nt, synthetic construct
  source 1..150: mol_type = other RNA
tggcagggactccccagcagtgagggtctctcgcttcctccaacactggtgctattgagggtctgttggtccaggggtctcactcattgggggccagaggttccatgaggtccacaacccggttgatgtagccaaattcgttgtcatacc

SEQ ID NO: 1055 - RNA, 149 nt, synthetic construct
  source 1..149: mol_type = other RNA
tggcagggactccccagcagtgagggtctctctcttcctcttgtgctcttgctggggctggtggtccagggtgcttacttctgcggccatggaggccatgaggtccaccaccctgttgctgtagccaaattcgttgtcataccaggaaa

SEQ ID NO: 1056 - RNA, 150 nt, synthetic construct
  source 1..150: mol_type = other RNA
tggcagggactccccagcagtgagggtctctctcttcacttgtgctcttgctagggctgggggactaggggtctcactccttggtggccatgttggccatgaggtcccccaccctgttgctgtagccaaattcgttgtcataccaggaaa

SEQ ID NO: 1057 - RNA, 150 nt, synthetic construct
  source 1..150: mol_type = other RNA
tggcagggactccccagcagtgagggtctctcgcttcctcttgtgctattgctggggctggtggtccacgggtcgtactcctgggaggccatgtgggttatgagtgtccaccaccctgttgctgtagccaaattcgttgtcataccagga

SEQ ID NO: 1058 - RNA, 151 nt, synthetic construct
  source 1..151: mol_type = other RNA
tggcagggactccccagcagtgagggtctctctcttcctcttgtgctcttgctggggcgtgttagccagggggttcacttcttggaggcccggtgggccatgaggtccaccaccctgttgctgtagccaaattcgttgtcataccaggaaa

SEQ ID NO: 1059 - RNA, 150 nt, synthetic construct
  source 1..150: mol_type = other RNA
tggcagggactccccagcagtgagggtctctctcttcctcttgtgctcttgctgggtctgagatgatccaggtgtctcctccttggaggcaatgggggccatgaggtccaccaccctgttgctgtagccaaattcgttgtcataccagga

SEQ ID NO: 1060 - RNA, 151 nt, synthetic construct
  source 1..151: mol_type = other RNA
tggcagggactccccagcagtgagggtctctctcttcctcttgtgctcttgctggggatggtgggacagggtcgccactacttggaggacatgtgggccatgaggtccaccaccctgttgctgtagccaaattcgttgtcataccaggaaa

SEQ ID NO: 1061 - RNA, 150 nt, synthetic construct
  source 1..150: mol_type = other RNA
tggcagggactccccagcagtgagggtctctctcttcctcttgtgctcttgctggggctggtgttccaggggtcttacctccttggaggccatgtgggccatgaggtccaccaccctgttgctgtagccaaattcgttgtcataccagga

SEQ ID NO: 1062 - RNA, 151 nt, synthetic construct
  source 1..151: mol_type = other RNA
tggcagggactccccagcagtgagggtctctctcttcatcttgtgtgcgggctggggctggtggtccagggatctcagtccgtgggggccatgtggtccatgaggtccaccaccctgttgctgtagccaaattcgttgtcataccaggaaa

SEQ ID NO: 1063 - RNA, 151 nt, synthetic construct
  source 1..151: mol_type = other RNA
tggcagggactccccagcagtgagggtctctctcttcctcttgtgctcttgctgtggctggtgggtcaggggtctcactttgtggaggccagatgggcagtgaggtccaccaccctgttgctgtagccaaattcgttgtcataccaggaaa

SEQ ID NO: 1064 - RNA, 151 nt, synthetic construct
  source 1..151: mol_type = other RNA
tggcagggactccccagcagtgagggtctctctcttcctcgtgtgctcttgctggggtgggttgtccagtagtctcaatcggtggagtccatgtgggccatgaggtcaaccaccctgttgctgtagccaaattcgttgtcataccaggaaa

SEQ ID NO: 1065 - RNA, 151 nt, synthetic construct
  source 1..151: mol_type = other RNA
tggcagggactccccagcagtgagggtctctctcttcctcttgtgctcttgctggggctggtggtccagggctcttactccttggaggccatgggggccatgaggtccaccaccctgttgctgtagccaaattcgttgtcataccaggaaa

SEQ ID NO: 1066 - RNA, 150 nt, synthetic construct
  source 1..150: mol_type = other RNA
tggcagggactccccagcagtgagggtctctatcttcacttgtactcttgctggggctggtggactaggggtctcattccttgggggccatgttggccatgaggtcccccaccctgttgctgtagccaaattcgttgtcataccaggaaa

SEQ ID NO: 1067 - RNA, 151 nt, synthetic construct
  source 1..151: mol_type = other RNA
tggcagggactccccagcagtgagggtctctctcttcctcttgtgctcttgctggggctggtggtccaggggtcttactccttggaggccagaggggccatgaggtccaccaccctgttgctgtagccaaattcgttgtcataccaggaaa

SEQ ID NO: 1068 - RNA, 150 nt, synthetic construct
  source 1..150: mol_type = other RNA
tggcagggactccccagcagtgagggtctctctcttcctcttgtgatctttgtttgggttggggtccgggggtctcactatacccttggaggtcatgttcatgagagtccaccaccctgttgctgtagccaaattcgttgtcataccagg

SEQ ID NO: 1069 - RNA, 151 nt, synthetic construct
  source 1..151: mol_type = other RNA
tggcagggactccccagcagtgagggtctctctcttcctcttgtgctcttgctggggctggtggttcaggggttgcactccttggaggccatgaccaccatgatgtccaccaccctgttgctgtagccaaattcgttgtcataccaggaaa

SEQ ID NO: 1070 - RNA, 150 nt, synthetic construct
  source 1..150: mol_type = other RNA
tggcagggactccccagcagtgagggtctctctcttcctctggtgctcttgcttgggggacatggtgggacaggtgtctcactccttggatgccatgtgggccatgagttccaccccctgttgctgtagccaaattcgttgtcataccag

SEQ ID NO: 1071 - RNA, 150 nt, synthetic construct
  source 1..150: mol_type = other RNA
tggcagggactccccagcagtgagggtctctctctgtcagtcttgtgatctttctggggctggtggttcaggggtcttactccttggaggtcatgtgggccatgaggtccaccaccctgttgctgtagccaaattcgttgtcataccagg

SEQ ID NO: 1072 - RNA, 149 nt, synthetic construct
  source 1..149: mol_type = other RNA
tggcagggactccccagcagtgagggtctctctcttcctcttgtgcttgatgggtctgggggtccaggggtcgcactccttggagttcatgtttgttatgaggtccaccaccctgttgctgtagccaaattcgttgtcataccaggaaa

SEQ ID NO: 1073 - RNA, 151 nt, synthetic construct
  source 1..151: mol_type = other RNA
tggcagggactccccagcagtgagggtctctctcttcctcttgtgctcttgctggggctggtggtccaggggtctcactccgtggaggccaggtaggccatgaggtccaccaccctgttgctgtagccaaattcgttgtcataccaggaaa

SEQ ID NO: 1074 - RNA, 151 nt, synthetic construct
  source 1..151: mol_type = other RNA
tggcagggactccccagcagtgagggtctctctcttcctcttgtgctctggctggggctggtggtccagggggcttactcctgggaggccataggggcaatgaggtccaccaccctgttgctgtagccaaattcgttgtcataccaggaaa

SEQ ID NO: 1075 - RNA, 151 nt, synthetic construct
  source 1..151: mol_type = other RNA
tggcagggactccccagcagtgagggtctcgctctgcctcttgtgcgcttgtgggggctggtttgccaggggtcgcactccttggcagctatgtgggccctgaggttccctaccctgttgctgtagccaaattcgttgtcataccaggaaa

SEQ ID NO: 1076 - RNA, 151 nt, synthetic construct
  source 1..151: mol_type = other RNA
tggcagggactccccagcagtgagggtctctctcttcctcttgtgctcttgctggggctggtggtccaggggtcttactcagtggaggccatgtgggccatgaggtccaccaccctgttgctgtagccaaattcgttgtcataccaggaaa

SEQ ID NO: 1077 - RNA, 151 nt, synthetic construct
  source 1..151: mol_type = other RNA
tggcagggactccccagcagtgagggtctctctattcttcttgtgctctggcttgggctggtggtcaaggggtcttactccttggaggccatgtgggccatgaggtccaccaccctgttgctgtagccaaattcgttgtcataccaggaaa

SEQ ID NO: 1078 - RNA, 151 nt, synthetic construct
  source 1..151: mol_type = other RNA
tggcagggactccccagcagtgagggtctctctcttcctcttgtgctcttgctacggctggtggtctcggggtctctctccttggaggctatatggtccatggtatccaccaccctgttgctgtagccaaattcgttgtcataccaggaaa

SEQ ID NO: 1079 - RNA, 151 nt, synthetic construct
  source 1..151: mol_type = other RNA
tggcagggactccccagcagtgagggtctctctcttcctcttgtgctcttgctggggctggggggccaggggtctcacgtctgggaggccctgtgggacatgcatgccaccaccctgttgctgtagccaaattcgttgtcataccaggaaa

SEQ ID NO: 1080 - RNA, 151 nt, synthetic construct
  source 1..151: mol_type = other RNA
tggcagggactccccagcagtgagggtctctctcttcctcttgtgtgcgggctggggctggtggtccagggatctcagtccgtgggggccatgtggtccatgaggtccaccaccctgttgctgtagccaaattcgttgtcataccaggaaa

SEQ ID NO: 1081 - RNA, 151 nt, synthetic construct
  source 1..151: mol_type = other RNA
tggcagggactccccagcagtgagggtctctctcttcctcttgtgctcttgctggggctggttggccgggggtcgcactccttggcggctatgtgggccatgaggtccaccaccctgttgctgtagccaaattcgttgtcataccaggaaa

SEQ ID NO: 1082 - RNA, 151 nt, synthetic construct
  source 1..151: mol_type = other RNA
tggcagggactccccagcagtgagggtctctctcttcctcttgtgctcttgcttgggcttgtggtccatggggctcacttcttggcggccagatgggacatgaggtccaccaccctgttgctgtagccaaattcgttgtcataccaggaaa

SEQ ID NO: 1083 - RNA, 149 nt, synthetic construct
  source 1..149: mol_type = other RNA
tggcagggactccccagcagtgagggtctctctcttcctcttgtgcttgatgggtctgggggtccaggggtcgtactccttggagttcatgtttgttatgaggtccaccaccctgttgctgtagccaaattcgttgtcataccaggaaa

SEQ ID NO: 1084 - RNA, 150 nt, synthetic construct
  source 1..150: mol_type = other RNA
tggcagggactccccagcagtgagggtctctctcttcctcttgtgctctggtttaggcttgtggtccatggggcttacttcttggcggccaggggggacaatgaggtccaccaccctgttgctgtagccaaattcgttgtcataccagga

SEQ ID NO: 1085 - RNA, 150 nt, synthetic construct
  source 1..150: mol_type = other RNA
tggcagggactccccagcagtgagggtctctcgcttcttcgtgttctctggtttaggcttgtggtccatggggctcacttcttggcggccaggggggacaatgaggtccaccaccctgttgctgtagccaaattcgttgtcataccagga

SEQ ID NO: 1086 - RNA, 149 nt, synthetic construct
  source 1..149: mol_type = other RNA
tggcagggactccccagcagtgagggtctctctcttcctctggagctcttgctggggctgggtctaggggtctcgctcattgtaggacatgtgggctgtgagttctaccaccctgttgctgtagccaaattcgttgtcataccaggaaa

SEQ ID NO: 1087 - RNA, 150 nt, synthetic construct
  source 1..150: mol_type = other RNA
tggcagggactccccagcagtgagggtctctagtttcatcttgttatcttgcttaggatggtggtccaggggtcttactcttggaggccatggggttcatgaggtccaccaccctgttgctgtagccaaattcgttgtcataccaggaaa

SEQ ID NO: 1088 - RNA, 150 nt, synthetic construct
  source 1..150: mol_type = other RNA
tggcagggactccccagcagtgagggtctctctcttcctcttgtgatctggcttgggcttgtggtccctggggagcacttcttggcggtaatgcacctgaggccatgaggtccaccaccctgttgctgtagccaaattcgttgtcatacc

SEQ ID NO: 1089 - RNA, 151 nt, synthetic construct
  source 1..151: mol_type = other RNA
tggcagggactccccagcagtgagggtctctctcttcctcttgtgctcttgctgggtcgggtgtgacagtcatttcactcttgggagttcatgtgggccatgaggtccaccaccctgttgctgtagccaaattcgttgtcataccaggaaa

SEQ ID NO: 1090 - RNA, 150 nt, synthetic construct
  source 1..150: mol_type = other RNA
tggcagggactccccagcagtgagggtctctctcttcctcttgtgcgcttgctggggctgttggtcacggggtctcaccttccgtggaggccatgtgggccatgaggttcatcaccatgttgctgtagccaaattcgttgtcataccagg

SEQ ID NO: 1091 - RNA, 151 nt, synthetic construct
  source 1..151: mol_type = other RNA
tggcagggactccccagcagtgagggtctctctcttcctcttgtgctcttgctggggcgggtggtccatgggtagcactccttggaggccatatgggccatgaggtccaccaccctgttgctgtagccaaattcgttgtcataccaggaaa

SEQ ID NO: 1092 - RNA, 149 nt, synthetic construct
  source 1..149: mol_type = other RNA
tggcagggactccccagcagtgagggtctctctcttcctcttgtgctcttgctggggctggtgtcagtggtcttactccttggaggccatgggggccatgaggtccaccaccctgttgctgtagccaaattcgttgtcataccaggaaa

SEQ ID NO: 1093 - RNA, 150 nt, synthetic construct
  source 1..150: mol_type = other RNA
tggcagggactccccagcagtgagggtctctcgcttcctactcttgtttgggctggtggtctaggggtctcgctccttggaggccatgtgggccatgaggtctgccaacctgaggcagattgctgtagccaaattcgttgtcataccagg

SEQ ID NO: 1094 - RNA, 151 nt, synthetic construct
  source 1..151: mol_type = other RNA
tggcagggactccccagcagtgagggtctctctcttcctcttgtgctcttgctggggttggtgggctagtggtatcactacttggaggccatatgtgccatgaggtccaccaccctgttgctgtagccaaattcgttgtcataccaggaaa

SEQ ID NO: 1095 - RNA, 151 nt, synthetic construct
  source 1..151: mol_type = other RNA
tggcagggactccccagcagtgagggtctctctcttcctcttgtgatctggctgaggctggtggtccatgggtattactccgtggaggtcatatgggccatgaggtccaccaccctgttgctgtagccaaattcgttgtcataccaggaaa

SEQ ID NO: 1096 - RNA, 151 nt, synthetic construct
  source 1..151: mol_type = other RNA
tggcagggactccccagcagtgagggtctctctcttcctcttgtgctcttgctgggactgggggtccggaggtagcgctcctggcaggccctgtgggccatgaggtccaccaccctgttgctgtagccaaattcgttgtcataccaggaaa

SEQ ID NO: 1097 - RNA, 151 nt, synthetic construct
  source 1..151: mol_type = other RNA
tggcagggactccccagcagtgagggtctctctcttcctcttgtgctcttgttggggctggtggtccgttgggcgcactcctcgatgtccatggaggccatgcggtccaccaccctgttgctgtagccaaattcgttgtcataccaggaaa

SEQ ID NO: 1098 - RNA, 150 nt, synthetic construct
  source 1..150: mol_type = other RNA
tggcagggactccccagcagtgagggtctctctcttcctcttgtgatctttgtttgggttggggtccgggggtctaactatacccttggaggtcatgttcatgagagtccaccaccctgttgctgtagccaaattcgttgtcataccagg

SEQ ID NO: 1099 - RNA, 151 nt, synthetic construct
  source 1..151: mol_type = other RNA
tggcagggactccccagcagtgagggtctctctcttcctcttgtgctctggctggggctggtggtccatgggtcttacttctttggacgcatggaggcactgaggtccaccaccctgttgctgtagccaaattcgttgtcataccaggaaa

SEQ ID NO: 1100 - RNA, 150 nt, synthetic construct
  source 1..150: mol_type = other RNA
tggcagggactccccagcagtgagggtctctctcttcctcgttggctcttgctggggctggtggttcaggggttgactccttggaggccatgaccaccatgatgtccaccaccctgttgctgtagccaaattcgttgtcataccaggaaa

SEQ ID NO: 1101 - RNA, 150 nt, synthetic construct
  source 1..150: mol_type = other RNA
tggcagggactccccagcagtgagggtctctcttgtccgagcaatgattctggctggggctggtgggggtcttactccttggaggccatgcgcctgaggaccatgaggtccaccaccctgttgctgtagccaaattcgttgtcataccag

SEQ ID NO: 1102 - RNA, 151 nt, synthetic construct
  source 1..151: mol_type = other RNA
tggcagggactccccagcagtgagggtctctctcttcctcttgtgctcttgatggggcgggtggtccaggggtcttactccttggaagccatataggttatgaggtccaccaccctgttgctgtagccaaattcgttgtcataccaggaaa

SEQ ID NO: 1103 - RNA, 150 nt, synthetic construct
  source 1..150: mol_type = other RNA
tggcagggactccccagcagtgagggtctctcgcttcctccaacactggtgctattgagggtctgttggtccaggggtcttactcattgggggccagaggttccatgaggtccacaacccggttgatgtagccaaattcgttgtcatacc

SEQ ID NO: 1104 - RNA, 150 nt, synthetic construct
  source 1..150: mol_type = other RNA
tggcagggactccccagcagtgagggtctctctcttcctcttgtgctcttgctggggctgttgttccatggatcttactccgatcgaggccatgtgggccatgaggtccaccaccctgttgctgtagccaaattcgttgtcataccagga

SEQ ID NO: 1105 - RNA, 151 nt, synthetic construct
  source 1..151: mol_type = other RNA
tggcagggactccccagcagtgagggtctctctcttcctcttgtgctcttactggggctggtggtcccgggggctcaatccttggaggccatgtggaccatgaggtccaccaccctgttgctgtagccaaattcgttgtcataccaggaaa

SEQ ID NO: 1106 - RNA, 151 nt, synthetic construct
  source 1..151: mol_type = other RNA
tggcagggactccccagcagtgagggtctctctcttcctcttgtgctcttgctggggttggggggcccggggtcttactcctttccagccatgtgggccatgaggtccaccaccctgttgctgtagccaaattcgttgtcataccaggaaa

SEQ ID NO: 1107 - RNA, 148 nt, synthetic construct
  source 1..148: mol_type = other RNA
tggcagggactccccagcagtgagggtctctctcttcctcttgtgttctgaggctgttggtccaggggtcttacctccttggaggccgtgggggacgtgaggtccaccaccctgttgctgtagccaaattcgttgtcataccaggaaa

SEQ ID NO: 1108 - RNA, 150 nt, synthetic construct
  source 1..150: mol_type = other RNA
tggcagggactccccagcagtgagggtctctctcttcctcttgtgctctcttgctggggcgggtggtccatgggtagcactccttggaggccatatgggccgggaggtccaccaccctgttgctgtagccaaattcgttgtcataccagg

SEQ ID NO: 1109 - RNA, 151 nt, synthetic construct
  source 1..151: mol_type = other RNA
tggcagggactccccagcagtgagggtctctctcttcctcttgtgctattgcggggtcgggtgtgacagtcatttcactcttgggagttcatgtgggctatgaggtccaccaccctgttgctgtagccaaattcgttgtcataccaggaaa

SEQ ID NO: 1110 - RNA, 146 nt, synthetic construct
  source 1..146: mol_type = other RNA
tggcagggactccccagcagtgagggtctctcttcctcttgtgttctgaggctgttggtccaggggtctcacctccttggaggccgtgggggacgtgaggtccaccaccctgttgctgtagccaaattcgttgtcataccaggaaa

SEQ ID NO: 1111 - RNA, 151 nt, synthetic construct
  source 1..151: mol_type = other RNA
tggcagggactccccagcagtgagggtctctctcttcctcttgtgctcttgctggggctggtttgccaggggtcgcactccttggcagctatgtgggccatgaggtccaccaccctgttgctgtagccaaattcgttgtcataccaggaaa

SEQ ID NO: 1112 - RNA, 151 nt, synthetic construct
  source 1..151: mol_type = other RNA
tggcagggactccccagcagtgagggtctctctcttcctcttgtgctcttgctggggctggtggtccatgggtcttacttctttggacgcatggaggccatgaggtccaccaccctgttgctgtagccaaattcgttgtcataccaggaaa

SEQ ID NO: 1113 - RNA, 151 nt, synthetic construct
  source 1..151: mol_type = other RNA
tggcagggactccccagcagtgagggtctctctcttcctcttgtgctcttgctggagctggtggtacaggtatctcaatccttggaggccatttgggccatgaggtccaccaccctgttgctgtagccaaattcgttgtcataccaggaaa

SEQ ID NO: 1114 - RNA, 151 nt, synthetic construct
  source 1..151: mol_type = other RNA
tggcagggactccccagcagtgagggtctctctcttcctcttgtgctcttcctggggttggggggcccggggtcttactcctttccagccatgtgggaaatgaggtccaccaccctgttgctgtagccaaattcgttgtcataccaggaaa

SEQ ID NO: 1115 - RNA, 150 nt, synthetic construct
  source 1..150: mol_type = other RNA
tggcagggactccccagcagtgagggtctctctcttcctcttgtgctcttgctggggctggaggtcccggaggtcttactccttggccatggtgggccatgaggtccaccaccctgttgctgtagccaaattcgttgtcataccaggaaa

SEQ ID NO: 1116 - RNA, 149 nt, synthetic construct
  source 1..149: mol_type = other RNA
tggcagggactccccagcagtgagggtctcctttcctcttgtgctcttgctggggctggtgatataggggtctcaatacttggaggccatgtgggccatgaggtccaccaccctgttgatgtagccaaattcgttgtcataccaggaaa

SEQ ID NO: 1117 - RNA, 148 nt, synthetic construct
  source 1..148: mol_type = other RNA
tggcagggactccccagcagtgagggtctctctcttcctcttgtgctcttgctggttctggtggtccagggttacactcctgggaggcagtgcgccatgaggtacacaaccctgttgctgtagccaaattcgttgtcataccaggaaa

SEQ ID NO: 1118 - RNA, 150 nt, synthetic construct
  source 1..150: mol_type = other RNA
tggcagggactccccagcagtgagggtctctcacttactctttccatctttgtttgggttggggtccgggggtctaactatacccttggaggtcatgttcatgagagtgtatcccaccctgttgctgtagccaaattcgttgtcatacca

SEQ ID NO: 1119 - RNA, 151 nt, synthetic construct
  source 1..151: mol_type = other RNA
tggcagggactccccagcagtgagggtctctctcttcctcttgtgatcttgctggggcgtgttagccagggggttcacttcttggaggcccggtgggccattaaggccaccaccctgttgctgtagccaaattcgttgtcataccaggaaa

SEQ ID NO: 1120 - RNA, 151 nt, synthetic construct
  source 1..151: mol_type = other RNA
tggcagggactccccagcagtgagggtctctctcttcctcttgtgctcttgctggggctggtggtccctgggtcttactccttggaggccagttgggccatgaggtccaccaccctgttgctgtagccaaattcgttgtcataccaggaaa

SEQ ID NO: 1121 - RNA, 150 nt, synthetic construct
  source 1..150: mol_type = other RNA
tggcagggactccccagcagtgagggtctctctcttcctcttgtgccttgctagggctggtggtcccggggtatctctcctgggagtccatgtgggccatgaggtccaccaccctggtgctgtagccaaattcgttgtcataccaggaaa

SEQ ID NO: 1122 - RNA, 151 nt, synthetic construct
  source 1..151: mol_type = other RNA
tggcagggactccccagcagtgagggtctctctcttcctcttgtgctcttgtttgggctggtggtctaggggtcttgctccttggaggccatgtgggccatgaggtccaccaccctgttgctgtagccaaattcgttgtcataccaggaaa

SEQ ID NO: 1123 - RNA, 151 nt, synthetic construct
  source 1..151: mol_type = other RNA
tggcagggactccccagcagtgagggtctctttcttcctcttgttacttggctgcggctggtgatccagggggcttactccttggaggccatgtaggtcatgaggtccaccaccctgttgctgtagccaaattcgttgtcataccaggaaa

SEQ ID NO: 1124 - RNA, 151 nt, synthetic construct
  source 1..151: mol_type = other RNA
tggcagggactccccagcagtgagggtctcgctcttcctagtgtgctcttgttggggctggtggtccgttgggcgaactcctcgatgtccatggaggccatgcggtccaacaccctattgctgtagccaaattcgttgtcataccaggaaa

SEQ ID NO: 1125 - RNA, 145 nt, synthetic construct
  source 1..145: mol_type = other RNA
tggcagggactccccagcagtgagggtctctcgcttcctagtgtgatcttgttggtggtccaggggtcgcattccttgggggccatgtgggccatgaggtccaccaccctgttgctgtagccaaattcgttgtcataccaggaaa

SEQ ID NO: 1126 - RNA, 151 nt, synthetic construct
  source 1..151: mol_type = other RNA
tggcagggactccccagcagtgagggtctctctcttcctcttgtgctcttgctggggctggtggtccatgggtattactccgtggaggtcatatgggccatgaggtccaccaccctgttgctgtagccaaattcgttgtcataccaggaaa

SEQ ID NO: 1127 - RNA, 151 nt, synthetic construct
  source 1..151: mol_type = other RNA
tggcagggactccccagcagtgagggtctctctcttcctcttgtgctcttgctggggctggggggccaggggtctcacgtctgggaggccctgtgggccatgaggtccaccaccctgttgctgtagccaaattcgttgtcataccaggaaa

SEQ ID NO: 1128 - RNA, 151 nt, synthetic construct
  source 1..151: mol_type = other RNA
tggcagggactccccagcagtgagggtctctatcttcctcttgtgttcttgctggggctggtggtcacgtgggcttgctcctgggcagccagttgggttatgagttccaccaccatggggctgtagccaaattcgttgtcataccaggaaa

SEQ ID NO: 1129 - RNA, 145 nt, synthetic construct
  source 1..145: mol_type = other RNA
tggcagggactccccagcagtgagggtctctctcttcctcttgtgatcttgttggtggtccaggggtcgcattccttgggggccatgtgggccatgaggtccaccaccctgttgctgtagccaaattcgttgtcataccaggaaa

SEQ ID NO: 1130 - RNA, 150 nt, synthetic construct
  source 1..150: mol_type = other RNA
tggcagggactccccagcagtgagggtctctctcttcctcttgtgccttgctagggctggtggtcccggggtatctctcctgggagtccatgtgggccatgaggtccaccaccctgttgctgtagccaaattcgttgtcataccaggaaa

SEQ ID NO: 1131 - RNA, 151 nt, synthetic construct
  source 1..151: mol_type = other RNA
tggcagggactccccagcagtgagggtctctctcttcctcttgtgctcttgctggggtgggttgtccagtagtctcaatcggtggagtccatgtgggccatgaggtccaccaccctgttgctgtagccaaattcgttgtcataccaggaaa

SEQ ID NO: 1132 - RNA, 151 nt, synthetic construct
  source 1..151: mol_type = other RNA
tggcagggactccccagcagtgagggtctctctcttcctcttgtgctcttgctgtggatggtgggacagggtcgccactacttggaggacatgtgggccatgagcgccaccaccctgttgctgtagccaaattcgttgtcataccaggaaa

SEQ ID NO: 1133 - RNA, 151 nt, synthetic construct
  source 1..151: mol_type = other RNA
tggcagggactccccagcagtgagggtctctctcttcctcttgtgcgcttgtgggggctggtttgccaggggtcgcactccttggcagctatgtgggccctgaggtccaccaccctgttgctgtagccaaattcgttgtcataccaggaaa

SEQ ID NO: 1134 - RNA, 150 nt, synthetic construct
  source 1..150: mol_type = other RNA
tggcagggactccccagcagtgagggtctctttcttcctcgtgttatctggcttgggcttgtggtccctggggagtacttcttggcggtaatgcacctgaggccatgaggtccaccaccctgttgctgtagccaaattcgttgtcatacc

SEQ ID NO: 1135 - RNA, 151 nt, synthetic construct
  source 1..151: mol_type = other RNA
tggcagggactccccagcagtgagggtctctctcttcctcttgtgctcttgctggggctggtggtccagggatcttagtccgtgggggccatgtgggccatgaggtccaccaccctgttgctgtagccaaattcgttgtcataccaggaaa

SEQ ID NO: 1136 - RNA, 151 nt, synthetic construct
  source 1..151: mol_type = other RNA
tggcagggactccccagcagtgagggtctctctcttcctcttgtgcttgttctggggctggtgctccagtggtttcaaaacttgtaggacatgtgggccattcggtccaccaccctgttgctgtagccaaattcgttgtcataccaggaaa

SEQ ID NO: 1137 - RNA, 151 nt, synthetic construct
  source 1..151: mol_type = other RNA
tggcagggactccccagcagtgagggtctctctcttcctcttgtgctcttgctggggatggtgggacagggtcgtcactacttggaggacatgtgggccatgaggtccaccaccctgttgctgtagccaaattcgttgtcataccaggaaa

SEQ ID NO: 1138 - RNA, 151 nt, synthetic construct
  source 1..151: mol_type = other RNA
tggcagggactccccagcagtgagggtctctctattcttcttgttctcttgctggggctggtggtcccgggatcttactccttggaggccatgtgggcaatgaggtccaccaccctgttgctgtagccaaattcgttgtcataccaggaaa

SEQ ID NO: 1139 - RNA, 150 nt, synthetic construct
  source 1..150: mol_type = other RNA
tggcagggactccccagcagtgagggtctctcgcttcctactcttgtttgggctggtggtctaggggtcttgctccttggaggccatgtgggccatgaggtctgccaacctgaggcagattgctgtagccaaattcgttgtcataccagg

SEQ ID NO: 1140 - RNA, 151 nt, synthetic construct
  source 1..151: mol_type = other RNA
tggcagggactccccagcagtgagggtctctctcttcctcttgtgctcttgctggggctggtggtccgttgggcgaactcctcgatgtccatggaggccatgaggtccaccaccctgttgctgtagccaaattcgttgtcataccaggaaa

SEQ ID NO: 1141 - RNA, 151 nt, synthetic construct
  source 1..151: mol_type = other RNA
tggcagggactccccagcagtgagggtctctctcttcatcttgtgtgcgggctggggctggtggtccagggatcttagtccgtgggggccatgtggtccatgaggtccaccaccctgttgctgtagccaaattcgttgtcataccaggaaa

SEQ ID NO: 1142 - RNA, 150 nt, synthetic construct
  source 1..150: mol_type = other RNA
tggcagggactccccagcagtgagggtctctctcttcctcttgtgagctggctggggctgttgttccatggatcttactccgatcgaggccatgtgggttatgaggtccaccaccctgttgctgtagccaaattcgttgtcataccagga

SEQ ID NO: 1143 - RNA, 151 nt, synthetic construct
  source 1..151: mol_type = other RNA
tggcagggactccccagcagtgagggtctctctcttcctcttgtgctcgtgctggggatggttgttcaggggtctcgctcctttgaggacatgtgggtaatgcgggccaccaccctgttgctgtagccaaattcgttgtcataccaggaaa

SEQ ID NO: 1144 - RNA, 151 nt, synthetic construct
  source 1..151: mol_type = other RNA
tggcagggactccccagcagtgagggtctctctctgcctcttgtgacattgtgtgggctagttggccaggggtcgcactcattggcggctatgtgggccctgaggtaaaccaccctgttgctgtagccaaattcgttgtcataccaggaaa

SEQ ID NO: 1145 - RNA, 151 nt, synthetic construct
  source 1..151: mol_type = other RNA
tggcagggactccccagcagtgagggtctctatctttatcttgttatcttgctgggactgggggtccggaggtagtgctcctggcaggccctgtgggccatgaggtccaacaccctgttgctgtagccaaattcgttgtcataccaggaaa

SEQ ID NO: 1146 - RNA, 151 nt, synthetic construct
  source 1..151: mol_type = other RNA
tggcagggactccccagcagtgagggtctctcgcttcttcgtgttctcttgcttgggcttgtggtccatggggcttacttcttggcggccagatgggacatgaggtccaccaccctgttgctgtagccaaattcgttgtcataccaggaaa

SEQ ID NO: 1147 - RNA, 150 nt, synthetic construct
  source 1..150: mol_type = other RNA
tggcagggactccccagcagtgagggtctctctcttcctcttgtgctattgagggtctgttggtccaggggtcttactcattgggggccagaggttccatgaggtccaccaccctgttgctgtagccaaattcgttgtcataccaggaaa

SEQ ID NO: 1148 - RNA, 150 nt, synthetic construct
  source 1..150: mol_type = other RNA
tggcagggactccccagcagtgagggtctctctcttcctcttgtgctcttgctggggttggggtccgggggtctaactatacccttggaggtcatgttgccatgaggtccaccaccctgttgctgtagccaaattcgttgtcataccagg

SEQ ID NO: 1149 - RNA, 151 nt, synthetic construct
  source 1..151: mol_type = other RNA
tggcagggactccccagcagtgagggtctctctcttcctcttgtgctcttgctggggctggtggttcaggggttgcactccttggaggccatgaccgccatgaggtccaccaccctgttgctgtagccaaattcgttgtcataccaggaaa

SEQ ID NO: 1150 - RNA, 145 nt, synthetic construct
  source 1..145: mol_type = other RNA
tggcagggactccccagcagtgagggtctctctcttcctcttgtgatcttgttggtggtccaggggtcgtattccttgggggccatgtgggccatgaggtccaccaccctgttgctgtagccaaattcgttgtcataccaggaaa

SEQ ID NO: 1151 - RNA, 151 nt, synthetic construct
  source 1..151: mol_type = other RNA
tggcagggactccccagcagtgagggtctctctcttcctcttgtgagctggctggggctgttggtacatgggtcttactccgtggaggccatgtgggttatgaggtccaccaccctgttgctgtagccaaattcgttgtcataccaggaaa

SEQ ID NO: 1152 - RNA, 149 nt, synthetic construct
  source 1..149: mol_type = other RNA
tggcagggactccccagcagtgagggtctctctcttcctcttgtgctcttgctggggctggtgtcagtggtcttactccttggaggccatgggggtcatgaggtccaccaccctgttgctgtagccaaattcgttgtcataccaggaaa

SEQ ID NO: 1153 - RNA, 150 nt, synthetic construct
  source 1..150: mol_type = other RNA
tggcagggactccccagcagtgagggtctctatcttccagtcttgtgttcgtgctggggctggtggtccgggggtattattcattggaggccatatgggtcgtgaggtccaccaccctgttgctgtagccaaattcgttgtcataccagg

SEQ ID NO: 1154 - RNA, 151 nt, synthetic construct
  source 1..151: mol_type = other RNA
tggcagggactccccagcagtgagggtctcgctcttcctagtgtgctcttgttggggctggtggtccgttgggcgcactcctcgatgtccatggaggccatgcggtccaacaccctattgctgtagccaaattcgttgtcataccaggaaa

SEQ ID NO: 1155 - RNA, 151 nt, synthetic construct
  source 1..151: mol_type = other RNA
tggcagggactccccagcagtgagggtctctctcttcctcttgtgctcttgctggtggtggtggtcccggtgtctcgcttcttggaggccatgtgggccatgaggtccaccaccctgttgctgtagccaaattcgttgtcataccaggaaa

SEQ ID NO: 1156 - RNA, 151 nt, synthetic construct
  source 1..151: mol_type = other RNA
tggcagggactccccagcagtgagggtctctctcttcctcttgtgacattgtgtgggctagttggccaggggtcgcactcattggcggctatgtgggccctgaggtccaccaccctgttgctgtagccaaattcgttgtcataccaggaaa

SEQ ID NO: 1157 - RNA, 151 nt, synthetic construct
  source 1..151: mol_type = other RNA
tggcagggactccccagcagtgagggtctctatctttatcttgttatcttgctgggactgggggtccggaggtagcgctcctggcaggccctgtgggccatgaggtccaacaccctgttgctgtagccaaattcgttgtcataccaggaaa

SEQ ID NO: 1158 - RNA, 151 nt, synthetic construct
  source 1..151: mol_type = other RNA
tggcagggactccccagcagtgagggtctctctcttcctcttgtgcttgtgctggagctggtggtccaggggtcttattccggggaggccatgggggtcatgaggtccaccaccctgttgctgtagccaaattcgttgtcataccaggaaa

SEQ ID NO: 1159 - RNA, 151 nt, synthetic construct
  source 1..151: mol_type = other RNA
tggcagggactccccagcagtgagggtctctctcttcctcttgtgctcttgctggggctggtggtctaggggtcttgctccttggaggccatgtgggccatgaggtccaccaccctgttgctgtagccaaattcgttgtcataccaggaaa

SEQ ID NO: 1160 - RNA, 151 nt, synthetic construct
  source 1..151: mol_type = other RNA
tggcagggactccccagcagtgagggtctctctcttcctcttgtgacattgcgggggctggttggccgggggtcgcactccttggcggctatgtgggcccggaggtccaccaccctgttgctgtagccaaattcgttgtcataccaggaaa

SEQ ID NO: 1161 - RNA, 150 nt, synthetic construct
  source 1..150: mol_type = other RNA
tggcagggactccccagcagtgagggtctctctcttcctcttgtgattctggctggggctggtgggggtcttactccttggaggccatgcgcctgaggaccatgaggtccaccaccctgttgctgtagccaaattcgttgtcataccagg

SEQ ID NO: 1162 - RNA, 150 nt, synthetic construct
  source 1..150: mol_type = other RNA
tggcagggactccccagcagtgagggtctctcgtttcctctttgctattgcggggtcgggtgtgacagtcatttcactcttgggagttcatgtgggctatgaggtccactacttggttgctgtagccaaattcgttgtcataccaggaaa

SEQ ID NO: 1163 - RNA, 151 nt, synthetic construct
  source 1..151: mol_type = other RNA
tggcagggactccccagcagtgagggtctctctcttcctcttgtgctcttgctggagcggttggtgcaggggtctctttccttggaggcaatgtgggccatgaggtccaccaccctgttgctgtagccaaattcgttgtcataccaggaaa

SEQ ID NO: 1164 - RNA, 150 nt, synthetic construct
  source 1..150: mol_type = other RNA
tggcagggactccccagcagtgagggtctctctcttcctcttgtgctcttgctggggctggtggttcaggggttgactccttggaggccatgaccaccatgatgtccaccaccctgttgctgtagccaaattcgttgtcataccaggaaa

SEQ ID NO: 1165 - RNA, 151 nt, synthetic construct
  source 1..151: mol_type = other RNA
tggcagggactccccagcagtgagggtctctctcttcctcttgtgctcttgctggggctggtggtccagggatctcagtccgtgggggccatgtgggccatgaggtccaccaccctgttgctgtagccaaattcgttgtcataccaggaaa

SEQ ID NO: 1166 - RNA, 150 nt, synthetic construct
  source 1..150: mol_type = other RNA
tggcagggactccccagcagtgagggtctcgctcttactcttgtgagctggctggggctgttgttccatggatcttactccgatcgaggccatgtgggttatgaggtccaccaccctgttgctgtagccaaattcgttgtcataccagga

SEQ ID NO: 1167 - RNA, 151 nt, synthetic construct
  source 1..151: mol_type = other RNA
tggcagggactccccagcagtgagggtctcttgtttcttcttgttctcgggctggggctggtggtccagggagcttactccttggaggccgtgtgggttatgaggtccaccaccctgttgctgtagccaaattcgttgtcataccaggaaa

SEQ ID NO: 1168 - RNA, 151 nt, synthetic construct
  source 1..151: mol_type = other RNA
tggcagggactccccagcagtgagggtctctctcttcctcttgtgctcttgctggtggtggtggtcccggtgtcttgcttcttggaggccatgtgggccatgaggtccaccaccctgttgctgtagccaaattcgttgtcataccaggaaa

SEQ ID NO: 1169 - RNA, 151 nt, synthetic construct
  source 1..151: mol_type = other RNA
tggcagggactccccagcagtgagggtctctctcttcctcttgtgctcttgctgggactgggggtccggaggtagtgctcctggcaggccctgtgggccatgaggtccaccaccctgttgctgtagccaaattcgttgtcataccaggaaa

SEQ ID NO: 1170 - RNA, 150 nt, synthetic construct
  source 1..150: mol_type = other RNA
tggcagggactccccagcagtgagggtctctctcttcctcttgtgatctggcttgggcttgtggtccctggggagtacttcttggcggtaatgcacctgaggccatgaggtccaccaccctgttgctgtagccaaattcgttgtcatacc

SEQ ID NO: 1171 - RNA, 151 nt, synthetic construct
  source 1..151: mol_type = other RNA
tggcagggactccccagcagtgagggtctctctcttcctcgtgtgctcttgctggggtgggttgtccagtagtcttaatcggtggagtccatgtgggccatgaggtcaaccaccctgttgctgtagccaaattcgttgtcataccaggaaa

SEQ ID NO: 1172 - RNA, 151 nt, synthetic construct
  source 1..151: mol_type = other RNA
tggcagggactccccagcagtgagggtctctctcttcctcttgtgttcttgctggggctggtggtcacgtgggcttgctcctgggcagccagttgggttatgagttccaccaccctgttgctgtagccaaattcgttgtcataccaggaaa

SEQ ID NO: 1173 - RNA, 151 nt, synthetic construct
  source 1..151: mol_type = other RNA
tggcagggactccccagcagtgagggtctctctcttcctcttgtgctcttgctggggatggttgttcaggggtctcgctcctttgaggacatgtgggccatgaggtccaccaccctgttgctgtagccaaattcgttgtcataccaggaaa

SEQ ID NO: 1174 - RNA, 148 nt, synthetic construct
  source 1..148: mol_type = other RNA
tggcagggactccccagcagtgagggtctctctcttcctcttgtgctcttgctggtggtggtccaggggtcgcattccttgggggccatgtgggccatgaggtccaccaccctgttgctgtagccaaattcgttgtcataccaggaaa

SEQ ID NO: 1175 - RNA, 151 nt, synthetic construct
  source 1..151: mol_type = other RNA
tggcagggactccccagcagtgagggtctctctcttcctcttgtgatcttgctgggactgggggtccggaggtagtgctcctggcaggccctgtgggccatgaggtccaccaccctgttgctgtagccaaattcgttgtcataccaggaaa

SEQ ID NO: 1176 - RNA, 150 nt, synthetic construct
  source 1..150: mol_type = other RNA
tggcagggactccccagcagtgagggtctctctcttcctcttgtgctcttgctggggctgttggtccaggggtctcacctccttggaggccgtgggggccatgaggtccaccaccctgttgctgtagccaaattcgttgtcataccagga

SEQ ID NO: 1177 - RNA, 145 nt, synthetic construct
  source 1..145: mol_type = other RNA
tggcagggactccccagcagtgagggtctctcgcttcctagtgtgatcttgttggtggtccaggggtcgtattccttgggggccatgtgggccatgaggtccaccaccctgttgctgtagccaaattcgttgtcataccaggaaa

SEQ ID NO: 1178 - RNA, 151 nt, synthetic construct
  source 1..151: mol_type = other RNA
tggcagggactccccagcagtgagggtctctctcttcctctggtgctctgactggggctgttggtctaggggtctcgctcattgtaggccatgtgggccgggagttctatcaccctgttgctgtagccaaattcgttgtcataccaggaaa

SEQ ID NO: 1179 - RNA, 151 nt, synthetic construct
  source 1..151: mol_type = other RNA
tggcagggactccccagcagtgagggtctctctcttcctcttgtgctcttgtttgggctggtggtctaggggtctcgctccttggaggccatgtgggccatgaggtccaccaccctgttgctgtagccaaattcgttgtcataccaggaaa

SEQ ID NO: 1180 - RNA, 151 nt, synthetic construct
  source 1..151: mol_type = other RNA
tggcagggactccccagcagtgagggtctctctcttcctcttgtgatcttgctgggactgggggtccggaggtagcgctcctggcaggccctgtgggccatgaggtccaccaccctgttgctgtagccaaattcgttgtcataccaggaaa

SEQ ID NO: 1181 - RNA, 150 nt, synthetic construct
  source 1..150: mol_type = other RNA
tggcagggactccccagcagtgagggtctctatcttccagtcttgtgttcgtgctggggctggtggtccgggggtatcattcattggaggccatatgggtcgtgaggtccaccaccctgttgctgtagccaaattcgttgtcataccagg

SEQ ID NO: 1182 - RNA, 151 nt, synthetic construct
  source 1..151: mol_type = other RNA
tggcagggactccccagcagtgagggtctctcgctcctcttgtgctcttgctgggtctgagatgatccaggtgtctcctccttggaggcaatgggggtcgtgaggtccaccaccctgttgctgtagccaaattcgttgtcataccaggaaa

SEQ ID NO: 1183 - RNA, 151 nt, synthetic construct
  source 1..151: mol_type = other RNA
tggcagggactccccagcagtgagggtctctctcttcctcttgtgctcttgctggggctagttggccaggggtcgcactcattggcggctatgtgggccatgaggtccaccaccctgttgctgtagccaaattcgttgtcataccaggaaa

SEQ ID NO: 1184 - RNA, 150 nt, synthetic construct
  source 1..150: mol_type = other RNA
tggcagggactccccagcagtgagggtctctcacttactctttccatctttgcttgggttggtggtgtggggtttaactatacccttggaggtcctgttgtccatgcggggtcacaccctgttgctgtagccaaattcgttgtcatacca

SEQ ID NO: 1185 - RNA, 150 nt, synthetic construct
  source 1..150: mol_type = other RNA
tggcagggactccccagcagtgagggtctctcgcttcttcgtgttctctggtttaggcttgtggtccatggggcttacttcttggcggccaggggggacaatgaggtccaccaccctgttgctgtagccaaattcgttgtcataccagga

SEQ ID NO: 1186 - RNA, 151 nt, synthetic construct
  source 1..151: mol_type = other RNA
tggcagggactccccagcagtgagggtctctctcttcctctggtgctcttgctggggctgttggtctgttggtctcgctcattgtaggccatgtgggctgtgagttataccaccctgttgctgtagccaaattcgttgtcataccaggaaa

SEQ ID NO: 1187 - RNA, 151 nt, synthetic construct
  source 1..151: mol_type = other RNA
tggcagggactccccagcagtgagggtctctctcttcctcttgtgctcttgctggggctggtggtcccggggtatctctcctgggagtccatgtgggccatgaggtccaccaccctgttgctgtagccaaattcgttgtcataccaggaaa

SEQ ID NO: 1188 - RNA, 150 nt, synthetic construct
  source 1..150: mol_type = other RNA
tggcagggactccccagcagtgagggtctctctcatcctctgctcttcttgcgggggctgggtctaggggtctcgctcattgtagggggccatgtgggctgtgagttctaccaccctgttgctgtagccaaattcgttgtcataccagga

SEQ ID NO: 1189 - RNA, 151 nt, synthetic construct
  source 1..151: mol_type = other RNA
tggcagggactccccagcagtgagggtctcttgcttcatcttgtgatcgggcttaggttcggtggtacggggtctcattctttgaggccatgtggtcaaatggggtccaccaccctgttgctgtagccaaattcgttgtcataccaggaaa

SEQ ID NO: 1190 - RNA, 150 nt, synthetic construct
  source 1..150: mol_type = other RNA
tggcagggactccccagcagtgagggtctctctcttcatcttgtgcgcttgctggggctgttggtcaaggggtctcactttccgtggaggccatgtgggccatgaggtccaccacccggttgctgtagccaaattcgttgtcataccagg

SEQ ID NO: 1191 - RNA, 150 nt, synthetic construct
  source 1..150: mol_type = other RNA
tggcagggactccccagcagtgagggtctctctcttcctcttgtgattctggctggggctggtgggggtctcactccttggaggccatgcgcctgaggaccatgaggtccaccaccctgttgctgtagccaaattcgttgtcataccagg

SEQ ID NO: 1192 - RNA, 148 nt, synthetic construct
  source 1..148: mol_type = other RNA
tggcagggactccccagcagtgagggtctctctcttcctcttgtgttgctgctggtggtggtcccggtgtctcgcttcttggaggccatgtgggccatgagttccaccaccctgttgctgtagccaaattcgttgtcataccaggaaa

SEQ ID NO: 1193 - RNA, 151 nt, synthetic construct
  source 1..151: mol_type = other RNA
tggcagggactccccagcagtgagggtctctctcttcctcttgtgctcttgctggggctggtggtctaggggtctcgctccttggaggccatgtgggccatgaggtccaccaccctgttgctgtagccaaattcgttgtcataccaggaaa

SEQ ID NO: 1194 - RNA, 150 nt, synthetic construct
  source 1..150: mol_type = other RNA
tggcagggactccccagcagtgagggtctctctcttcctcttgtgctcttgctgggtctgagatgatccaggtgtctcctccttggaggcaatgggggtcgtgaggtccaccaccctgttgctgtagccaaattcgttgtcataccagga

SEQ ID NO: 1195 - RNA, 151 nt, synthetic construct
  source 1..151: mol_type = other RNA
tggcagggactccccagcagtgagggtctcttgcttcatcttgtgatcgggcttaggttcggtggtacggggtcttattctttgaggccatgtggtcaaatggggtccaccaccctgttgctgtagccaaattcgttgtcataccaggaaa

SEQ ID NO: 1196 - RNA, 151 nt, synthetic construct
  source 1..151: mol_type = other RNA
tggcagggactccccagcagtgagggtctctctcttcctcttgtgctcttgttggggctggtggtccgttgggcgaactcctcgatgtccatggaggccatgcggtccaccaccctgttgctgtagccaaattcgttgtcataccaggaaa

SEQ ID NO: 1197 - RNA, 151 nt, synthetic construct
  source 1..151: mol_type = other RNA
tggcagggactccccagcagtgagggtctctatcttcctcttgtgttcttgctggggctggtggtcacgtgggctcgctcctgggcagccagttgggttatgagttccaccaccatggggctgtagccaaattcgttgtcataccaggaaa

SEQ ID NO: 1198 - RNA, 150 nt, synthetic construct
  source 1..150: mol_type = other RNA
tggcagggactccccagcagtgagggtctctctcttcctcttgtgctcttgctggggttggtggtgtggggtttaactatacccttggaggtcctgtttgccatgaggtccaccaccctgttgctgtagccaaattcgttgtcataccag

SEQ ID NO: 1199 - RNA, 148 nt, synthetic construct
  source 1..148: mol_type = other RNA
tggcagggactccccagcagtgagggtctctctcttcctcttgtgttgctgctggtggtggtcccggtgtcttgcttcttggaggccatgtgggccatgagttccaccaccctgttgctgtagccaaattcgttgtcataccaggaaa

SEQ ID NO: 1200 - RNA, 151 nt, synthetic construct
  source 1..151: mol_type = other RNA
tggcagggactccccagcagtgagggtctctctcttcctcttgtgctcttgctggggctggggggccaggggtcttacgtctgggaggccctgtgggacatgcatgccaccaccctgttgctgtagccaaattcgttgtcataccaggaaa

SEQ ID NO: 1201 - RNA, 151 nt, synthetic construct
  source 1..151: mol_type = other RNA
tggcagggactccccagcagtgagggtctctctcttcctcttgtgctcttcctggggttgggggtccaggggtcgcactcctttccggccatgtgggacatgaggtccaccaccctgttgctgtagccaaattcgttgtcataccaggaaa

SEQ ID NO: 1202 - RNA, 148 nt, synthetic construct
  source 1..148: mol_type = other RNA
tggcagggactccccagcagtgagggtctctctcttcctcttgtgctcttgctggtggtggtccaggggtcgtattccttgggggccatgtgggccatgaggtccaccaccctgttgctgtagccaaattcgttgtcataccaggaaa

SEQ ID NO: 1203 - RNA, 150 nt, synthetic construct
  source 1..150: mol_type = other RNA
tggcagggactccccagcagtgagggtctctctcttcctcttgtgctcttgctggggcttgtggtccctggggagtacttcttggcggtaatgcacctgaggccatgaggtccaccaccctgttgctgtagccaaattcgttgtcatacc

SEQ ID NO: 1204 - RNA, 150 nt, synthetic construct
  source 1..150: mol_type = other RNA
tggcagggactccccagcagtgagggtctctctcttcctcttgtgctcttgctggggctgttggtccaggggtcttacctccttggaggccgtgggggccatgaggtccaccaccctgttgctgtagccaaattcgttgtcataccagga

SEQ ID NO: 1205 - RNA, 151 nt, synthetic construct
  source 1..151: mol_type = other RNA
tggcagggactccccagcagtgagggtctctctcttcctcttgtgctcttgctggggctggtggtccgttgggcgcactcctcgatgtccatggaggccatgaggtccaccaccctgttgctgtagccaaattcgttgtcataccaggaaa

SEQ ID NO: 1206 - RNA, 40 nt, synthetic construct
  source 1..40: mol_type = other RNA
caaagttgtcatggatgaccttggctcgggtgccaagcag

SEQ ID NO: 1207 - RNA, 41 nt, synthetic construct
  source 1..41: mol_type = other RNA
caaagttgtcatggatgaccttgcccaggagtgccaagcag

SEQ ID NO: 1208 - RNA, 41 nt, synthetic construct
  source 1..41: mol_type = other RNA
caaagttgtcatggatgacctaggtgcaggggttccaagca

SEQ ID NO: 1209 - RNA, 41 nt, synthetic construct
  source 1..41: mol_type = other RNA
caaagttgtcatggatgaccttgaccagggatgccaagcag

SEQ ID NO: 1210 - RNA, 41 nt, synthetic construct
  source 1..41: mol_type = other RNA
caaagttgtcatggatgaccttggagagggatgccaagcag

SEQ ID NO: 1211 - RNA, 42 nt, synthetic construct
  source 1..42: mol_type = other RNA
caaagttgtcatggatgaccttgacatgggggtgccaagcag

SEQ ID NO: 1212 - RNA, 41 nt, synthetic construct
  source 1..41: mol_type = other RNA
caaagttgtcatggatgaccgtggcgtcgggtgccaagcac

SEQ ID NO: 1213 - RNA, 41 nt, synthetic construct
  source 1..41: mol_type = other RNA
caaagttgtcatggatgaccttgacaccgggtgccaagcag

SEQ ID NO: 1214 - RNA, 40 nt, synthetic construct
  source 1..40: mol_type = other RNA
caaagttgtcatggatgaccttagccggggttccaagcag

SEQ ID NO: 1215 - RNA, 41 nt, synthetic construct
  source 1..41: mol_type = other RNA
caaagttgtcatggatgaccttggaaaggggtgccaagcgg

SEQ ID NO: 1216 - RNA, 41 nt, synthetic construct
  source 1..41: mol_type = other RNA
caaagttgtcatggatgaccttgcccaagggtgccaagcag

SEQ ID NO: 1217 - RNA, 41 nt, synthetic construct
  source 1..41: mol_type = other RNA
caaagttgtcatggatgaccttggacatgggtgccaagtag

SEQ ID NO: 1218 - RNA, 41 nt, synthetic construct
  source 1..41: mol_type = other RNA
caaagttgtcatggatgaccttaggcaggggtgtcaagcag

SEQ ID NO: 1219 - RNA, 41 nt, synthetic construct
  source 1..41: mol_type = other RNA
caaagttgtcatggatgaccttggccaggactgccaagcag

SEQ ID NO: 1220 - RNA, 41 nt, synthetic construct
  source 1..41: mol_type = other RNA
caaagttgtcatggatgaccttaggcaggggtgccaagcag

SEQ ID NO: 1221 - RNA, 43 nt, synthetic construct
  source 1..43: mol_type = other RNA
caaagttgtcatggatgaccttggcaaagggtctgccaagcaa

SEQ ID NO: 1222 - RNA, 41 nt, synthetic construct
  source 1..41: mol_type = other RNA
caaagttgtcatggatgaccttggataggggtgccaagcag

SEQ ID NO: 1223 - RNA, 41 nt, synthetic construct
  source 1..41: mol_type = other RNA
caaagttgtcatggatgaccttggcgaggggggccaagcag

SEQ ID NO: 1224 - RNA, 41 nt, synthetic construct
  source 1..41: mol_type = other RNA
caaagttgtcatggatgaccttgaccaggggcgccaagcag

SEQ ID NO: 1225 - RNA, 40 nt, synthetic construct
  source 1..40: mol_type = other RNA
caaagttgtcatggatgaccttggcaaagggtgccaagtg

SEQ ID NO: 1226 - RNA, 41 nt, synthetic construct
  source 1..41: mol_type = other RNA
caaagttgtcatggatgaccttgtccaggagtgccaagcag

SEQ ID NO: 1227 - RNA, 41 nt, synthetic construct
  source 1..41: mol_type = other RNA
caaagttgtcatggatgaccttggccatgggtgccaagcag

SEQ ID NO: 1228 - RNA, 41 nt, synthetic construct
  source 1..41: mol_type = other RNA
caaagttgtcatggatgacctttgccacgggtgccaagcag

SEQ ID NO: 1229 - RNA, 41 nt, synthetic construct
  source 1..41: mol_type = other RNA
caaagttgtcatggatgaccatgtccaggactgccaaacag

SEQ ID NO: 1230 - RNA, 41 nt, synthetic construct
  source 1..41: mol_type = other RNA
caaagttgtcatggatgaccttgaccaggggagccaagcag

SEQ ID NO: 1231 - RNA, 41 nt, synthetic construct
  source 1..41: mol_type = other RNA
caaagttgtcatggatgacctcggccgggggagccaagcag

SEQ ID NO: 1232 - RNA, 41 nt, synthetic construct
  source 1..41: mol_type = other RNA
caaagttgtcatggatgaccttggccaggagcgccaagcag

SEQ ID NO: 1233 - RNA, 41 nt, synthetic construct
  source 1..41: mol_type = other RNA
caaagttgtcatggatgaccttggacaggcgtgccaagcag

SEQ ID NO: 1234 - RNA, 41 nt, synthetic construct
  source 1..41: mol_type = other RNA
caaagttgtcatggatgaccttaaccaagggtgccaagcag

SEQ ID NO: 1235 - RNA, 42 nt, synthetic construct
  source 1..42: mol_type = other RNA
caaagttgtcatggatgaccttggccaaggagtgccaaggag

SEQ ID NO: 1236 - RNA, 41 nt, synthetic construct
  source 1..41: mol_type = other RNA
caaagttgtcatggatgacctcggcaatgggcgccaagcag

SEQ ID NO: 1237 - RNA, 41 nt, synthetic construct
  source 1..41: mol_type = other RNA
caaagttgtcatggatgaccttggccagaggtgccaagccg

SEQ ID NO: 1238 - RNA, 41 nt, synthetic construct
  source 1..41: mol_type = other RNA
caaagttgtcatggatgaccttagccacgggtgccaagcag

SEQ ID NO: 1239 - RNA, 41 nt, synthetic construct
  source 1..41: mol_type = other RNA
caaagttgtcatggatgaccttgaaaaggggtgccaagcag

SEQ ID NO: 1240 - RNA, 41 nt, synthetic construct
  source 1..41: mol_type = other RNA
caaagttgtcatggatgaccttagccaagggtgccaagcag

SEQ ID NO: 1241 - RNA, 41 nt, synthetic construct
  source 1..41: mol_type = other RNA
caaagttgtcatggatgaccttgaccaggagtgccaagctg

SEQ ID NO: 1242 - RNA, 41 nt, synthetic construct
  source 1..41: mol_type = other RNA
caaagttgtcatggatgacccttgccacgggtgccaagcag

SEQ ID NO: 1243 - RNA, 42 nt, synthetic construct
  source 1..42: mol_type = other RNA
caaagttgtcatggatgaccttggcgaggggcagccaagcag

SEQ ID NO: 1244 - RNA, 41 nt, synthetic construct
  source 1..41: mol_type = other RNA
caaagttgtcatggatgaccttaggcaagggtgtcaagcag

SEQ ID NO: 1245 - RNA, 41 nt, synthetic construct
  source 1..41: mol_type = other RNA
caaagttgtcatggatgaccttggctaagggttccaagcag

SEQ ID NO: 1246 - RNA, 47 nt, synthetic construct
  source 1..47: mol_type = other RNA
caaagttgtcatggatgaccttggcgagattcaggcgtgccaagcag

SEQ ID NO: 1247 - RNA, 41 nt, synthetic construct
  source 1..41: mol_type = other RNA
caaagttgtcatggatgacctggtcaaggggtgccaagcag

SEQ ID NO: 1248 - RNA, 41 nt, synthetic construct
  source 1..41: mol_type = other RNA
caaagttgtcatggatgacctcagccaggggtgccaagcac

SEQ ID NO: 1249 - RNA, 40 nt, synthetic construct
  source 1..40: mol_type = other RNA
caaagttgtcatggatgaccctggcaaggggtgccaagca

SEQ ID NO: 1250 - RNA, 40 nt, synthetic construct
  source 1..40: mol_type = other RNA
caaagttgtcatggatgaccttggccagagtgccaagcag

SEQ ID NO: 1251 - RNA, 41 nt, synthetic construct
  source 1..41: mol_type = other RNA
caaagttgtcatggatgaccttggccaagggtgccaaacag

SEQ ID NO: 1252 - RNA, 41 nt, synthetic construct
  source 1..41: mol_type = other RNA
caaagttgtcatggatgaccttggccaagggcgccaagctg

SEQ ID NO: 1253 - RNA, 41 nt, synthetic construct
  source 1..41: mol_type = other RNA
atgaccttggccagggatgttaagcagttgatggtgcagga

SEQ ID NO: 1254 - RNA, 41 nt, synthetic construct
  source 1..41: mol_type = other RNA
caaagttgtcatggatgaccttcaccaagggtgccaagcag

SEQ ID NO: 1255 - RNA, 41 nt, synthetic construct
  source 1..41: mol_type = other RNA
caaagttgtcatggatgaccctggccaagggtgccaagcag

SEQ ID NO: 1256 - RNA, 41 nt, synthetic construct
  source 1..41: mol_type = other RNA
caaagttgtcatggatgacctcaaccagaggtgccaagctg

SEQ ID NO: 1257 - RNA, 41 nt, synthetic construct
  source 1..41: mol_type = other RNA
caaagttgtcatggatgaccttgaccaggggtgtcaagcag

SEQ ID NO: 1258 - RNA, 41 nt, synthetic construct
  source 1..41: mol_type = other RNA
caaagttgtcatggatgaccttggccaacggtaccaagcag

SEQ ID NO: 1259 - RNA, 41 nt, synthetic construct
  source 1..41: mol_type = other RNA
caaagttgtcatggatgaccttggcaagtgggtgccaagca

SEQ ID NO: 1260 - RNA, 43 nt, synthetic construct
  source 1..43: mol_type = other RNA
atgaccttggcgacgggtgccaagcactacaggtggtgcagga

SEQ ID NO: 1261 - RNA, 41 nt, synthetic construct
  source 1..41: mol_type = other RNA
atgaccttggccaggtctgccaaacagttcttggtgcagga

SEQ ID NO: 1262 - RNA, 40 nt, synthetic construct
  source 1..40: mol_type = other RNA
atgaccttggccaggggagccaagccgttatggtgcagga

SEQ ID NO: 1263 - RNA, 41 nt, synthetic construct
  source 1..41: mol_type = other RNA
caaagttgtcatggatgaccttggccaatggtgccaagcag

SEQ ID NO: 1264 - RNA, 41 nt, synthetic construct
  source 1..41: mol_type = other RNA
caaagttgtcatggatgaccttaggcaggggtgttaagcag

SEQ ID NO: 1265 - RNA, 41 nt, synthetic construct
  source 1..41: mol_type = other RNA
caaagttgtcatggatgacctcggccaagggtgccaagcag

SEQ ID NO: 1266 - RNA, 46 nt, synthetic construct
  source 1..46: mol_type = other RNA
caaagttgtcatggatgaccttgaccaggggagccaagacccccgg

SEQ ID NO: 1267 - RNA, 41 nt, synthetic construct
  source 1..41: mol_type = other RNA
caaagttgtcatggatgaccttggccagggatgtcaagcag

SEQ ID NO: 1268 - RNA, 41 nt, synthetic construct
  source 1..41: mol_type = other RNA
caaagttgtcatggatgaccttggccatgggtaccaagcag

SEQ ID NO: 1269 - RNA, 41 nt, synthetic construct
  source 1..41: mol_type = other RNA
caaagttgtcatggatgaccttggccaggggtgttaagcaa

SEQ ID NO: 1270 - RNA, 41 nt, synthetic construct
  source 1..41: mol_type = other RNA
caaagttgtcatggatgaccttggctatgggttccaagcag

SEQ ID NO: 1271 - RNA, 41 nt, synthetic construct
  source 1..41: mol_type = other RNA
caaagttgtcatggatgaccttggccagaggtgccaagcag

SEQ ID NO: 1272 - RNA, 44 nt, synthetic construct
  source 1..44: mol_type = other RNA
atgaccttggttagggggtgccaagcagacaaggtggtgcagga

SEQ ID NO: 1273 - RNA, 42 nt, synthetic construct
  source 1..42: mol_type = other RNA
caaagttgtcatggatgaccttggtcagggggtgccaagcag

SEQ ID NO: 1274 - RNA, 41 nt, synthetic construct
  source 1..41: mol_type = other RNA
atgaccttggccgggggtgccaaacaactggtggtgcagga

SEQ ID NO: 1275 - RNA, 41 nt, synthetic construct
  source 1..41: mol_type = other RNA
caaagttgtcatggatgacctttaccaggggtgtcaagcag

SEQ ID NO: 1276 - RNA, 41 nt, synthetic construct
  source 1..41: mol_type = other RNA
caaagttgtcatggatgaccttggccatgggcgccaagctg

SEQ ID NO: 1277 - RNA, 41 nt, synthetic construct
  source 1..41: mol_type = other RNA
caaagttgtcatggatgaccttggccgagggtgccaagcag

SEQ ID NO: 1278 - RNA, 41 nt, synthetic construct
  source 1..41: mol_type = other RNA
caaagttgtcatggatgaccttggccagggccgccaagcag

SEQ ID NO: 1279 - RNA, 41 nt, synthetic construct
  source 1..41: mol_type = other RNA
atgaccttggccaagggtgccaaacagttgctggtgcagga

SEQ ID NO: 1280 - RNA, 42 nt, synthetic construct
  source 1..42: mol_type = other RNA
atgaccttggccatggagtgccaaggagttggtggtgcagga

SEQ ID NO: 1281 - RNA, 41 nt, synthetic construct
  source 1..41: mol_type = other RNA
caaagttgtcatggatgaccctggccatgggtgccaagcag

SEQ ID NO: 1282 - RNA, 41 nt, synthetic construct
  source 1..41: mol_type = other RNA
ggatgccaagcaggtcgtggtgcaggaggcattgctgatga

SEQ ID NO: 1283 - RNA, 41 nt, synthetic construct
  source 1..41: mol_type = other RNA
atgaccttggcctggggtgccaagaagttagtggtgcagga

SEQ ID NO: 1284 - RNA, 41 nt, synthetic construct
  source 1..41: mol_type = other RNA
atgaccttggccagggatgtcaagcagttgatggtgcagga

SEQ ID NO: 1285 - RNA, 41 nt, synthetic construct
  source 1..41: mol_type = other RNA
caaagttgtcatggatgaccttgaccaggggtgccaagcag

SEQ ID NO: 1286 - RNA, 41 nt, synthetic construct
  source 1..41: mol_type = other RNA
caaagttgtcatggatgaccttggctaagggtgccaagcag

SEQ ID NO: 1287 - RNA, 41 nt, synthetic construct
  source 1..41: mol_type = other RNA
atgaccttggccagggatgccaagcaggtggtggtgcagga

SEQ ID NO: 1288 - RNA, 40 nt, synthetic construct
  source 1..40: mol_type = other RNA
atgaccttggccaggggagccaagaagttatggtgcagga

SEQ ID NO: 1289 - RNA, 41 nt, synthetic construct
  source 1..41: mol_type = other RNA
caaagttgtcatggatgaccttggctatgggtgccaagcag

SEQ ID NO: 1290 - RNA, 41 nt, synthetic construct
  source 1..41: mol_type = other RNA
caaagttgtcatggatgaccttggccagggatgctaagcaa

SEQ ID NO: 1291 - RNA, 40 nt, synthetic construct
  source 1..40: mol_type = other RNA
caaagttgtcatggatgaccttggccagggtgccaagcag

SEQ ID NO: 1292 - RNA, 41 nt, synthetic construct
  source 1..41: mol_type = other RNA
caaagttgtcatggatgaccttgaccaggggagccaagccg

SEQ ID NO: 1293 - RNA, 41 nt, synthetic construct
  source 1..41: mol_type = other RNA
caaagttgtcatggatgaccttggtcaggagagccatgcac

SEQ ID NO: 1294 - RNA, 41 nt, synthetic construct
  source 1..41: mol_type = other RNA
atgaccttggtgcaggggttccaagcattgttggtgcagga

SEQ ID NO: 1295 - RNA, 41 nt, synthetic construct
  source 1..41: mol_type = other RNA
caaagttgtcatggatgaccttggccaagggttccaagcaa

SEQ ID NO: 1296 - RNA, 41 nt, synthetic construct
  source 1..41: mol_type = other RNA
atgaccttggccatgggtgccaaggagttggtggtgcagga

SEQ ID NO: 1297 - RNA, 41 nt, synthetic construct
  source 1..41: mol_type = other RNA
atgaccttggccagggatgccaagcaggtcgtggtgcagga

SEQ ID NO: 1298 - RNA, 41 nt, synthetic construct
  source 1..41: mol_type = other RNA
caaagttgtcatggatgaccttggccagcggtgccaagcat

SEQ ID NO: 1299 - RNA, 41 nt, synthetic construct
  source 1..41: mol_type = other RNA
atgaccttgggcaggggtgtcaagcagctgctggtgcagga

SEQ ID NO: 1300 - RNA, 41 nt, synthetic construct
  source 1..41: mol_type = other RNA
caaagttgtcatggatgaccttaaccaggggtgccaagccg

SEQ ID NO: 1301 - RNA, 39 nt, synthetic construct
  source 1..39: mol_type = other RNA
caaagttgtcatggatgaccttggccaagggtgccaaga

SEQ ID NO: 1302 - RNA, 41 nt, synthetic construct
  source 1..41: mol_type = other RNA
caaagttgtcatggatgaccttggccatgggtgtcaagcag

SEQ ID NO: 1303 - RNA, 41 nt, synthetic construct
  source 1..41: mol_type = other RNA
caaagttgtcatggatgaccttggccagggatgccaagcag

SEQ ID NO: 1304 - RNA, 41 nt, synthetic construct
  source 1..41: mol_type = other RNA
caaagttgtcatggatgaccatggtcaggggtgccaagcag

SEQ ID NO: 1305 - RNA, 41 nt, synthetic construct
  source 1..41: mol_type = other RNA
caaagttgtcatggatgaccttggcaaggggtgccaagcag

SEQ ID NO: 1306 - RNA, 41 nt, synthetic construct
  source 1..41: mol_type = other RNA
caaagttgtcatggatgaccttggccaagggtgtcaagcag

SEQ ID NO: 1307 - RNA, 41 nt, synthetic construct
  source 1..41: mol_type = other RNA
atgaccttggccaggagcgccaagcagctggtggtgcagga

SEQ ID NO: 1308 - RNA, 41 nt, synthetic construct
  source 1..41: mol_type = other RNA
atgaccttggccaagggtaccaaggagtaggtggtgcagga

SEQ ID NO: 1309 - RNA, 41 nt, synthetic construct
  source 1..41: mol_type = other RNA
atgaccttggccatgggtaccaagcggtaggtggtgcagga

SEQ ID NO: 1310 - RNA, 41 nt, synthetic construct
  source 1..41: mol_type = other RNA
caaagttgtcatggatgaccttgtccaggggtgccaaacag

SEQ ID NO: 1311 - RNA, 41 nt, synthetic construct
  source 1..41: mol_type = other RNA
caaagttgtcatggatgacctcagccaggggtgccaagctg

SEQ ID NO: 1312 - RNA, 41 nt, synthetic construct
  source 1..41: mol_type = other RNA
atgaccttggccaggggtgccaagcagtaggtggtgcagga

SEQ ID NO: 1313 - RNA, 40 nt, synthetic construct
  source 1..40: mol_type = other RNA
caaagttgtcatggatgacctcggcctagggatgccaacg

SEQ ID NO: 1314 - RNA, 42 nt, synthetic construct
  source 1..42: mol_type = other RNA
atgaccttggcaagtgggtgccaagcattgtgtggtgcagga

SEQ ID NO: 1315 - RNA, 41 nt, synthetic construct
  source 1..41: mol_type = other RNA
caaagttgtcatggatgaccttggccaagggtggcaagcac

SEQ ID NO: 1316 - RNA, 41 nt, synthetic construct
  source 1..41: mol_type = other RNA
atgaccttggccatgggcgccaagctgttggtggtgcagga

SEQ ID NO: 1317 - RNA, 40 nt, synthetic construct
  source 1..40: mol_type = other RNA
caaagttgtcatggatgaccttggccaggggtgccaagag

SEQ ID NO: 1318 - RNA, 41 nt, synthetic construct
  source 1..41: mol_type = other RNA
atgaccttggctaggagtgccaaccagttggtggtgcagga

SEQ ID NO: 1319 - RNA, 41 nt, synthetic construct
  source 1..41: mol_type = other RNA
atgaccttggccagggccgccaagcagtcggtggtgcagga

SEQ ID NO: 1320 - RNA, 41 nt, synthetic construct
  source 1..41: mol_type = other RNA
caaagttgtcatggatgaccttggccaagggtgccaagcag

SEQ ID NO: 1321 - RNA, 40 nt, synthetic construct
  source 1..40: mol_type = other RNA
atgaccttggccaggggagccaagcagttatggtgcagga

SEQ ID NO: 1322 - RNA, 44 nt, synthetic construct
  source 1..44: mol_type = other RNA
atgaccttggctaggggtgttaagcagttgtaggtggtgcagga

SEQ ID NO: 1323 - RNA, 41 nt, synthetic construct
  source 1..41: mol_type = other RNA
caaagttgtcatggatgaccttggccaggagtgccaagcag

SEQ ID NO: 1324 - RNA, 41 nt, synthetic construct
  source 1..41: mol_type = other RNA
caaagttgtcatggatgaccttggctaggagtgccaaccag

SEQ ID NO: 1325 - RNA, 41 nt, synthetic construct
  source 1..41: mol_type = other RNA
caaagttgtcatggatgaccatggccaggggtgtcaagcag

SEQ ID NO: 1326 - RNA, 41 nt, synthetic construct
  source 1..41: mol_type = other RNA
caaagttgtcatggatgaccttggccagggatgccaagcaa

SEQ ID NO: 1327 - RNA, 41 nt, synthetic construct
  source 1..41: mol_type = other RNA
caaagttgtcatggatgaccttgaccaggggtgccaagcaa

SEQ ID NO: 1328 - RNA, 41 nt, synthetic construct
  source 1..41: mol_type = other RNA
atgaccttggccagaggtgccaagcagctgctggtgcagga

SEQ ID NO: 1329 - RNA, 41 nt, synthetic construct
  source 1..41: mol_type = other RNA
caaagttgtcatggatgaccttggccattggtgccaagcag

SEQ ID NO: 1330 - RNA, 41 nt, synthetic construct
  source 1..41: mol_type = other RNA
atgaccttggccaggagtgccaagctgttggtggtgcagga

SEQ ID NO: 1331 - RNA, 40 nt, synthetic construct
  source 1..40: mol_type = other RNA
caaagttgtcatggatgaccttggccaagggtgccaacag

SEQ ID NO: 1332 - RNA, 41 nt, synthetic construct
  source 1..41: mol_type = other RNA
caaagttgtcatggatgaccttggccagggcttgccaagcc

SEQ ID NO: 1333 - RNA, 42 nt, synthetic construct
  source 1..42: mol_type = other RNA
caaagttgtcatggatgacctttggccaggagtgccaagtaa

SEQ ID NO: 1334 - RNA, 41 nt, synthetic construct
  source 1..41: mol_type = other RNA
caaagttgtcatggatgaccttggccaagggtaccaaggag

SEQ ID NO: 1335 - RNA, 41 nt, synthetic construct
  source 1..41: mol_type = other RNA
caaagttgtcatggatgaccttaaccaggggtgccaagcag

SEQ ID NO: 1336 - RNA, 43 nt, synthetic construct
  source 1..43: mol_type = other RNA
caaagttgtcatggatgaccttggccagcggggtgccaagcag

SEQ ID NO: 1337 - RNA, 41 nt, synthetic construct
  source 1..41: mol_type = other RNA
atgaccttggccaagggtaccaagcggtaggtggtgcagga

SEQ ID NO: 1338 - RNA, 41 nt, synthetic construct
  source 1..41: mol_type = other RNA
atgaccttggccaggggtgttaagcaattcgtggtgcagga

SEQ ID NO: 1339 - RNA, 41 nt, synthetic construct
  source 1..41: mol_type = other RNA
atgaccttggccatgggtgccaagcggtcggtggtgcagga

SEQ ID NO: 1340 - RNA, 41 nt, synthetic construct
  source 1..41: mol_type = other RNA
atgaccttggcctagggatgccaacgtttggtggtgcagga

SEQ ID NO: 1341 - RNA, 41 nt, synthetic construct
  source 1..41: mol_type = other RNA
atgaccttggacaggcgtgccaagcagttggtggtgcagga

SEQ ID NO: 1342 - RNA, 44 nt, synthetic construct
  source 1..44: mol_type = other RNA
gggtgccaagcgagccacggtggtgcaggaggcattgctgatga

SEQ ID NO: 1343 - RNA, 41 nt, synthetic construct
  source 1..41: mol_type = other RNA
caaagttgtcatggatgaccttggcctgggatgccacgcag

SEQ ID NO: 1344 - RNA, 42 nt, synthetic construct
  source 1..42: mol_type = other RNA
atgaccttggtgaggggcagccaagcagctggtggtgcagga

SEQ ID NO: 1345 - RNA, 41 nt, synthetic construct
  source 1..41: mol_type = other RNA
atgaccttggccaagggcgccaaggaactggtggtgcagga

SEQ ID NO: 1346 - RNA, 41 nt, synthetic construct
  source 1..41: mol_type = other RNA
atgaccttggccatgggtgccaagcggctggtggtgcagga

SEQ ID NO: 1347 - RNA, 42 nt, synthetic construct
  source 1..42: mol_type = other RNA
atgaccttggccaggagtgccaagtaacatggtggtgcagga

SEQ ID NO: 1348 - RNA, 41 nt, synthetic construct
  source 1..41: mol_type = other RNA
atgaccttggcaaggggtgccaagcggtaagtggtgcagga

SEQ ID NO: 1349 - RNA, 41 nt, synthetic construct
  source 1..41: mol_type = other RNA
caaagttgtcatggatgaccttggccaggggtgctaagcag

SEQ ID NO: 1350 - RNA, 41 nt, synthetic construct
  source 1..41: mol_type = other RNA
caaagttgtcatggatgacctcggcctggggtgccaagaag

SEQ ID NO: 1351 - RNA, 41 nt, synthetic construct
  source 1..41: mol_type = other RNA
caaagttgtcatggatgaccttgtccaggggtgccaagcag

SEQ ID NO: 1352 - RNA, 41 nt, synthetic construct
  source 1..41: mol_type = other RNA
atgaccttggccagaggtgccaagctgtcagtggtgcagga

SEQ ID NO: 1353 - RNA, 41 nt, synthetic construct
  source 1..41: mol_type = other RNA
atgaccttggccaagggcgccaagctgttggtggtgcagga

SEQ ID NO: 1354 - RNA, 41 nt, synthetic construct
  source 1..41: mol_type = other RNA
caaagttgtcatggatgaccttgaccaggggtgccaagcat

SEQ ID NO: 1355 - RNA, 41 nt, synthetic construct
  source 1..41: mol_type = other RNA
caaagttgtcatggatgaccttggccagggatgttaagcag

SEQ ID NO: 1356 - RNA, 41 nt, synthetic construct
  source 1..41: mol_type = other RNA
caaagttgtcatggatgaccttggccaagggtgctaaacag

SEQ ID NO: 1357 - RNA, 41 nt, synthetic construct
  source 1..41: mol_type = other RNA
atgaccttggctaagggttccaagcggttggtggtgcagga

SEQ ID NO: 1358 - RNA, 41 nt, synthetic construct
  source 1..41: mol_type = other RNA
caaagttgtcatggatgaccttggccgggggtgctaaacaa

SEQ ID NO: 1359 - RNA, 41 nt, synthetic construct
  source 1..41: mol_type = other RNA
caaagttgtcatggatgaccttaggcaagggtgttaagcag

SEQ ID NO: 1360 - RNA, 40 nt, synthetic construct
  source 1..40: mol_type = other RNA
atgaccttggccgggggtgctaacagttggtggtgcagga

SEQ ID NO: 1361 - RNA, 41 nt, synthetic construct
  source 1..41: mol_type = other RNA
atgaccttggccatgggtgccaagctctcggtggtgcagga

SEQ ID NO: 1362 - RNA, 41 nt, synthetic construct
  source 1..41: mol_type = other RNA
atgaccttggccagaggtgccaagtcgttaatggtgcagga

SEQ ID NO: 1363 - RNA, 41 nt, synthetic construct
  source 1..41: mol_type = other RNA
caaagttgtcatggatgaccttggccaggggtgccacgcag

SEQ ID NO: 1364 - RNA, 41 nt, synthetic construct
  source 1..41: mol_type = other RNA
caaagttgtcatggatgacctttaccaggggtgttaagcag

SEQ ID NO: 1365 - RNA, 41 nt, synthetic construct
  source 1..41: mol_type = other RNA
atgaccttggaaaggggtgccaagcggtaaatggtgcagga

SEQ ID NO: 1366 - RNA, 40 nt, synthetic construct
  source 1..40: mol_type = other RNA
atgaccttggccagcggtgccaagcatttctggtgcagga

SEQ ID NO: 1367 - RNA, 41 nt, synthetic construct
  source 1..41: mol_type = other RNA
caaagttgtcatggatgacctcggcccggggtgtcaagcag

SEQ ID NO: 1368 - RNA, 41 nt, synthetic construct
  source 1..41: mol_type = other RNA
atgaccttggccaggggtgttaagcaaatcgtggtgcagga

SEQ ID NO: 1369 - RNA, 41 nt, synthetic construct
  source 1..41: mol_type = other RNA
caaagttgtcatggatgaccttaggcaggggtgctaagcag

SEQ ID NO: 1370 - RNA, 41 nt, synthetic construct
  source 1..41: mol_type = other RNA
caaagttgtcatggatgaccctggccatgggtgccaaggag

SEQ ID NO: 1371 - RNA, 41 nt, synthetic construct
  source 1..41: mol_type = other RNA
caaagttgtcatggatgaccttggcaaggggtgtcaagcag

SEQ ID NO: 1372 - RNA, 41 nt, synthetic construct
  source 1..41: mol_type = other RNA
caaagttgtcatggatgaccttggccaggggtgtcaagcaa

SEQ ID NO: 1373 - RNA, 41 nt, synthetic construct
  source 1..41: mol_type = other RNA
caaagttgtcatggatgaccttggccaagggcgccaaggaa

SEQ ID NO: 1374 - RNA, 41 nt, synthetic construct
  source 1..41: mol_type = other RNA
caaagttgtcatggatgaccttggccaggggcgccaagcaa

SEQ ID NO: 1375 - RNA, 41 nt, synthetic construct
  source 1..41: mol_type = other RNA
caaagttgtcatggatgaccttggcccggggtgccaagcag

SEQ ID NO: 1376 - RNA, 43 nt, synthetic construct
  source 1..43: mol_type = other RNA
caaagttgtcatggatgaccttggcccggggtgtcaagcccag

SEQ ID NO: 1377 - RNA, 41 nt, synthetic construct
  source 1..41: mol_type = other RNA
atgaccttggccaggagtgccaagcagttggtggtgcagga

SEQ ID NO: 1378 - RNA, 41 nt, synthetic construct
  source 1..41: mol_type = other RNA
atgaccttggccaagggtgccaagcggctggtggtgcagga

SEQ ID NO: 1379 - RNA, 40 nt, synthetic construct
  source 1..40: mol_type = other RNA
caaagttgtcatggatgaccttggccaggggtgccaacag

SEQ ID NO: 1380 - RNA, 40 nt, synthetic construct
  source 1..40: mol_type = other RNA
caaagttgtcatggatgaccttggccaggggtgctaacag

SEQ ID NO: 1381 - RNA, 42 nt, synthetic construct
  source 1..42: mol_type = other RNA
atgaccttggcatgggggtgccaagcagttggtggtgcagga

SEQ ID NO: 1382 - RNA, 41 nt, synthetic construct
  source 1..41: mol_type = other RNA
atgaccttggccaagggtgccaagcagttgctggtgcagga

SEQ ID NO: 1383 - RNA, 41 nt, synthetic construct
  source 1..41: mol_type = other RNA
atgaccttggccaggagtgccaagcagcgcgtggtgcagga

SEQ ID NO: 1384 - RNA, 41 nt, synthetic construct
  source 1..41: mol_type = other RNA
atgaccttggccaggggtgttaagcagtttatggtgcagga

SEQ ID NO: 1385 - RNA, 40 nt, synthetic construct
  source 1..40: mol_type = other RNA
atgaccttggccagagtgccaagcagtaggtggtgcagga

SEQ ID NO: 1386 - RNA, 41 nt, synthetic construct
  source 1..41: mol_type = other RNA
atgaccttggccaggggttccaagcagttggtggtgcagga

SEQ ID NO: 1387 - RNA, 41 nt, synthetic construct
  source 1..41: mol_type = other RNA
atgaccttggccatgggtgtcaagcggtcggtggtgcagga

SEQ ID NO: 1388 - RNA, 41 nt, synthetic construct
  source 1..41: mol_type = other RNA
atgaccttggcgaggggggccaagcagctggtggtgcagga

SEQ ID NO: 1389 - RNA, 41 nt, synthetic construct
  source 1..41: mol_type = other RNA
atgaccttggccaggggtaccaacccgttggtggtgcagga

SEQ ID NO: 1390 - RNA, 41 nt, synthetic construct
  source 1..41: mol_type = other RNA
caaagttgtcatggatgaccttggccaggggtgtcaatcag

SEQ ID NO: 1391 - RNA, 41 nt, synthetic construct
  source 1..41: mol_type = other RNA
atgaccttgggcaggggtgccaagcagtccctggtgcagga

SEQ ID NO: 1392 - RNA, 40 nt, synthetic construct
  source 1..40: mol_type = other RNA
atgaccttggccagggtgccaagcagttggtggtgcagga

SEQ ID NO: 1393 - RNA, 41 nt, synthetic construct
  source 1..41: mol_type = other RNA
atgaccttggccatgggtggcaagcgcttggtggtgcagga

SEQ ID NO: 1394 - RNA, 41 nt, synthetic construct
  source 1..41: mol_type = other RNA
caaagttgtcatggatgaccttgaccaggggagccaagaag

SEQ ID NO: 1395 - RNA, 41 nt, synthetic construct
  source 1..41: mol_type = other RNA
atgaccttggccaagggtgccaagcagttgatggtgcagga

SEQ ID NO: 1396 - RNA, 40 nt, synthetic construct
  source 1..40: mol_type = other RNA
atgaccttggcaaagggtgccaagtgttggtggtgcagga

SEQ ID NO: 1397 - RNA, 41 nt, synthetic construct
  source 1..41: mol_type = other RNA
atgaccttggagagggatgccaagcagttggtggtgcagga

SEQ ID NO: 1398 - RNA, 41 nt, synthetic construct
  source 1..41: mol_type = other RNA
atgaccttggccaggggcgccaagcagttggtggtgcagga

SEQ ID NO: 1399 - RNA, 46 nt, synthetic construct
  source 1..46: mol_type = other RNA
atgaccttggccaggggagccaagacccccggttgttggtgcagga

SEQ ID NO: 1400 - RNA, 41 nt, synthetic construct
  source 1..41: mol_type = other RNA
caaagttgtcatggatgaccttggcccggggtgtcaagcag

SEQ ID NO: 1401 - RNA, 41 nt, synthetic construct
  source 1..41: mol_type = other RNA
ggatgccaagcagttggcggtgcaggaggcattgctgatga

SEQ ID NO: 1402 - RNA, 41 nt, synthetic construct
  source 1..41: mol_type = other RNA
caaagttgtcatggatgaccctggccaagggtgccaaggag

SEQ ID NO: 1403 - RNA, 41 nt, synthetic construct
  source 1..41: mol_type = other RNA
atgaccttggctatgggttccaagcggttggtggtgcagga

SEQ ID NO: 1404 - RNA, 43 nt, synthetic construct
  source 1..43: mol_type = other RNA
caaagttgtcatggatgaccttggccaggggcctgtcaagcaa

SEQ ID NO: 1405 - RNA, 41 nt, synthetic construct
  source 1..41: mol_type = other RNA
caaagttgtcatggatgaccttggcaaggggtgctaagcag

SEQ ID NO: 1406 - RNA, 40 nt, synthetic construct
  source 1..40: mol_type = other RNA
caaagttgtcatggatgacctggccaggggtgccaagcag

SEQ ID NO: 1407 - RNA, 41 nt, synthetic construct
  source 1..41: mol_type = other RNA
atgaccttggcaatgggcgccaagcagttggtggtgcagga

SEQ ID NO: 1408 - RNA, 41 nt, synthetic construct
  source 1..41: mol_type = other RNA
atgaccttggccattggtgccaagcggtcggtggtgcagga

SEQ ID NO: 1409 - RNA, 41 nt, synthetic construct
  source 1..41: mol_type = other RNA
atgaccttggccaggggtgtcaagcagtttatggtgcagga

SEQ ID NO: 1410 - RNA, 41 nt, synthetic construct
  source 1..41: mol_type = other RNA
caaagttgtcatggatgaccttggccaggggtgccaagcag

SEQ ID NO: 1411 - RNA, 40 nt, synthetic construct
  source 1..40: mol_type = other RNA
caaagttgtcatggatgaccttggccaagggtgctaacag

SEQ ID NO: 1412 - RNA, 41 nt, synthetic construct
  source 1..41: mol_type = other RNA
caaagttgtcatggatgaccatggccaggggtgttaagcag

SEQ ID NO: 1413 - RNA, 41 nt, synthetic construct
  source 1..41: mol_type = other RNA
atgaccttggaaaggggtgccaagcagatggtggtgcagga

SEQ ID NO: 1414 - RNA, 41 nt, synthetic construct
  source 1..41: mol_type = other RNA
atgaccttggcccggggtgtcaagcagtccgtggtgcagga

SEQ ID NO: 1415 - RNA, 40 nt, synthetic construct
  source 1..40: mol_type = other RNA
atgaccttggcaaggggtgctaagcattggtggtgcagga

SEQ ID NO: 1416 - RNA, 57 nt, synthetic construct
  source 1..57: mol_type = other RNA
atgaccttggccaggggcgccaagcaattcggatcacctgagatcagtggtgcagga

SEQ ID NO: 1417 - RNA, 41 nt, synthetic construct
  source 1..41: mol_type = other RNA
atgaccttggccaagggttccaagcgatccgtggtgcagga

SEQ ID NO: 1418 - RNA, 41 nt, synthetic construct
  source 1..41: mol_type = other RNA
caaagttgtcatggatgaccttggccatgggtgccaagctc

SEQ ID NO: 1419 - RNA, 41 nt, synthetic construct
  source 1..41: mol_type = other RNA
caaagttgtcatggatgaccttggccatgggcgccaaggaa

SEQ ID NO: 1420 - RNA, 41 nt, synthetic construct
  source 1..41: mol_type = other RNA
caaagttgtcatggatgaccttggccaggggttccaagcag

SEQ ID NO: 1421 - RNA, 41 nt, synthetic construct
  source 1..41: mol_type = other RNA
caaagttgtcatggatgaccttggccaggggtgttaagcag

SEQ ID NO: 1422 - RNA, 40 nt, synthetic construct
  source 1..40: mol_type = other RNA
atgaccttggctcgggtgccaagcagggaatggtgcagga

SEQ ID NO: 1423 - RNA, 41 nt, synthetic construct
  source 1..41: mol_type = other RNA
atgaccttggccaagggtaccaagcggttggtggtgcagga

SEQ ID NO: 1424 - RNA, 40 nt, synthetic construct
  source 1..40: mol_type = other RNA
atgaccttggcaaggggtgccaagcattggtggtgcagga

SEQ ID NO: 1425 - RNA, 47 nt, synthetic construct
  source 1..47: mol_type = other RNA
atgaccttggcgagattcaggcgtgccaagcaggcagtggtgcagga

SEQ ID NO: 1426 - RNA, 41 nt, synthetic construct
  source 1..41: mol_type = other RNA
atgaccttggccaatggtgccaagcggtcggtggtgcagga

SEQ ID NO: 1427 - RNA, 39 nt, synthetic construct
  source 1..39: mol_type = other RNA
caaagttgtcatggatgaccttggccaggggtgctaagg

SEQ ID NO: 1428 - RNA, 43 nt, synthetic construct
  source 1..43: mol_type = other RNA
gggtgccaagcactacaggttttgcaggaggcattgctgatga

SEQ ID NO: 1429 - RNA, 41 nt, synthetic construct
  source 1..41: mol_type = other RNA
gggtgttaagcagctggtggtgcaggaggcattgctgatga

SEQ ID NO: 1430 - RNA, 41 nt, synthetic construct
  source 1..41: mol_type = other RNA
atgaccttggccagaggtgccaagcagttggtggtgcagga

SEQ ID NO: 1431 - RNA, 41 nt, synthetic construct
  source 1..41: mol_type = other RNA
atgaccttgggcaggggtgctaagcagtccctggtgcagga

SEQ ID NO: 1432 - RNA, 41 nt, synthetic construct
  source 1..41: mol_type = other RNA
caaagttgtcatggatgaccttggccggaggtgccaaccag

SEQ ID NO: 1433 - RNA, 41 nt, synthetic construct
  source 1..41: mol_type = other RNA
caaagttgtcatggatgaccttggtcaggggtgccaagcag

SEQ ID NO: 1434 - RNA, 42 nt, synthetic construct
  source 1..42: mol_type = other RNA
atgaccttggcccggggtgtcaagcccagttatggtgcagga

SEQ ID NO: 1435 - RNA, 40 nt, synthetic construct
  source 1..40: mol_type = other RNA
atgaccttggcccggggtgtcaagcagttgtggtgcagga

SEQ ID NO: 1436 - RNA, 41 nt, synthetic construct
  source 1..41: mol_type = other RNA
atgaccttggtcaggggtgttaagcagctggtggtgcagga

SEQ ID NO: 1437 - RNA, 43 nt, synthetic construct
  source 1..43: mol_type = other RNA
caaagttgtcatggatgaccgatcacgccaggggtgccaagag

SEQ ID NO: 1438 - RNA, 43 nt, synthetic construct
  source 1..43: mol_type = other RNA
caaagttgtcatggatgaccttggcccggggtgttaagcccag

SEQ ID NO: 1439 - RNA, 41 nt, synthetic construct
  source 1..41: mol_type = other RNA
atgaccttggccgggggtgccaagcagttgatggtgcagga

SEQ ID NO: 1440 - RNA, 41 nt, synthetic construct
  source 1..41: mol_type = other RNA
caaagttgtcatggatgaccttggccaggggtgccaagctg

SEQ ID NO: 1441 - RNA, 41 nt, synthetic construct
  source 1..41: mol_type = other RNA
atgaccttggccaagggtggcaagcgcttggtggtgcagga

SEQ ID NO: 1442 - RNA, 41 nt, synthetic construct
  source 1..41: mol_type = other RNA
caaagttgtcatggatgaccttggccaggggtgctaagaag

SEQ ID NO: 1443 - RNA, 41 nt, synthetic construct
  source 1..41: mol_type = other RNA
caaagttgtcatggatgaccttggccgggggtgccaagcaa

SEQ ID NO: 1444 - RNA, 41 nt, synthetic construct
  source 1..41: mol_type = other RNA
caaagttgtcatggatgaccatggccaggggtgccaagcag

SEQ ID NO: 1445 - RNA, 41 nt, synthetic construct
  source 1..41: mol_type = other RNA
atgaccttggccacgggtgccaagcggttggtggtgcagga

SEQ ID NO: 1446 - RNA, 41 nt, synthetic construct
  source 1..41: mol_type = other RNA
caaagttgtcatggatgaccttggccaggactgctaagcag

SEQ ID NO: 1447 - RNA, 41 nt, synthetic construct
  source 1..41: mol_type = other RNA
gagtgccaaccagttggtggtgcaggaggcattgctgatga

SEQ ID NO: 1448 - RNA, 41 nt, synthetic construct
  source 1..41: mol_type = other RNA
atgaccttggtcaggggtgctaagcagtccgtggtgcagga

SEQ ID NO: 1449 - RNA, 40 nt, synthetic construct
  source 1..40: mol_type = other RNA
caaagttgtcatggatgaccttggccaggggtgtcaagcc

SEQ ID NO: 1450 - RNA, 41 nt, synthetic construct
  source 1..41: mol_type = other RNA
atgaccttggccggaggtgccaaccagttggtggtgcagga

SEQ ID NO: 1451 - RNA, 41 nt, synthetic construct
  source 1..41: mol_type = other RNA
caaagttgtcatggatgaccttggccgggggtgccaaacaa

SEQ ID NO: 1452 - RNA, 41 nt, synthetic construct
  source 1..41: mol_type = other RNA
atgaccttggccaagggtgtcaagcggtcggtggtgcagga

SEQ ID NO: 1453 - RNA, 41 nt, synthetic construct
  source 1..41: mol_type = other RNA
atgaccttggccatgggtgccaagcagttggtggtgcagga

SEQ ID NO: 1454 - RNA, 52 nt, synthetic construct
  source 1..52: mol_type = other RNA
atgaccttggataggggtgccaagcagaccaaaaataccaggtggtgcagga

SEQ ID NO: 1455 - RNA, 41 nt, synthetic construct
  source 1..41: mol_type = other RNA
atgaccttggcaccgggtgccaagcagttggtggtgcagga

SEQ ID NO: 1456 - RNA, 43 nt, synthetic construct
  source 1..43: mol_type = other RNA
atgaccttggccagcggggtgccaagcagttggtggtgcagga

SEQ ID NO: 1457 - RNA, 41 nt, synthetic construct
  source 1..41: mol_type = other RNA
caaagttgtcatggatgaccttggaaaggggtcgtaagcag

SEQ ID NO: 1458 - RNA, 41 nt, synthetic construct
  source 1..41: mol_type = other RNA
atgaccttggccaggggtgctaagcagttgctggtgcagga

SEQ ID NO: 1459 - RNA, 41 nt, synthetic construct
  source 1..41: mol_type = other RNA
atgaccttggcccggggtgccaagcagctagtggtgcagga

SEQ ID NO: 1460 - RNA, 41 nt, synthetic construct
  source 1..41: mol_type = other RNA
atgaccttggccaggggtgctaagctgttggtggtgcagga

SEQ ID NO: 1461 - RNA, 41 nt, synthetic construct
  source 1..41: mol_type = other RNA
caaagttgtcatggatgaccttggccaggggtgtcaagcag

SEQ ID NO: 1462 - RNA, 41 nt, synthetic construct
  source 1..41: mol_type = other RNA
caaagttgtcatggatgacctcggccaggggtgttaagcag

SEQ ID NO: 1463 - RNA, 41 nt, synthetic construct
  source 1..41: mol_type = other RNA
caaagttgtcatggatgaccttggccaagggtgccaagctc

SEQ ID NO: 1464 - RNA, 41 nt, synthetic construct
  source 1..41: mol_type = other RNA
atgaccttggccaggggtgccaaacagttggtggtgcagga

SEQ ID NO: 1465 - RNA, 41 nt, synthetic construct
  source 1..41: mol_type = other RNA
atgaccttggccatgggtgccaagcggttggtggtgcagga

SEQ ID NO: 1466 - RNA, 41 nt, synthetic construct
  source 1..41: mol_type = other RNA
caaagttgtcatggatgaccatggtcaggggtgctaagcag

SEQ ID NO: 1467 - RNA, 41 nt, synthetic construct
  source 1..41: mol_type = other RNA
atgaccttggtcaggggtgccaagcagtgggtggtgcagga

SEQ ID NO: 1468 - RNA, 41 nt, synthetic construct
  source 1..41: mol_type = other RNA
gggtgccaagcagcaggtggtgcaggaggcattgctgatga

SEQ ID NO: 1469 - RNA, 41 nt, synthetic construct
  source 1..41: mol_type = other RNA
caaagttgtcatggatgaccttggccaggagtgctaagcag

SEQ ID NO: 1470 - RNA, 41 nt, synthetic construct
  source 1..41: mol_type = other RNA
caaagttgtcatggatgacctcggccaggggtgtcaagcag

SEQ ID NO: 1471 - RNA, 41 nt, synthetic construct
  source 1..41: mol_type = other RNA
atgaccttggccaggggtgtcaagcaattcgtggtgcagga

SEQ ID NO: 1472 - RNA, 52 nt, synthetic construct
  source 1..52: mol_type = other RNA
gggtgccaaacagttgcccaaaaataccaggtgcaggaggcattgctgatga

SEQ ID NO: 1473 - RNA, 41 nt, synthetic construct
  source 1..41: mol_type = other RNA
gggcgccaagctgttggtggtgcaggaggcattgctgatga

SEQ ID NO: 1474 - RNA, 40 nt, synthetic construct
  source 1..40: mol_type = other RNA
atgaccttggccaggggtgttaagcagtggtggtgcagga

SEQ ID NO: 1475 - RNA, 41 nt, synthetic construct
  source 1..41: mol_type = other RNA
atgaccttggccaggggtgccaagctgttggtggtgcagga

SEQ ID NO: 1476 - RNA, 39 nt, synthetic construct
  source 1..39: mol_type = other RNA
caaagttgtcatggatgaccttggccaagggtgccaagg

SEQ ID NO: 1477 - RNA, 41 nt, synthetic construct
  source 1..41: mol_type = other RNA
caaagttgtcatggatgaccctggaaaggggtctcaagcag

SEQ ID NO: 1478 - RNA, 39 nt, synthetic construct
  source 1..39: mol_type = other RNA
atgaccttggccgggggtgctaaggttggtggtgcagga

SEQ ID NO: 1479 - RNA, 41 nt, synthetic construct
  source 1..41: mol_type = other RNA
caaagttgtcatggatgaccttggccagaggtgctaagcag

SEQ ID NO: 1480 - RNA, 42 nt, synthetic construct
  source 1..42: mol_type = other RNA
ggggtgccaagcagacaaggttgcaggaggcattgctgatga

SEQ ID NO: 1481 - RNA, 41 nt, synthetic construct
  source 1..41: mol_type = other RNA
atgaccttggccgtgggtgccaagcggttggtggtgcagga

SEQ ID NO: 1482 - RNA, 41 nt, synthetic construct
  source 1..41: mol_type = other RNA
gggtgccaagcagtttgtggtgcaggaggcattgctgatga

SEQ ID NO: 1483 - RNA, 41 nt, synthetic construct
  source 1..41: mol_type = other RNA
atgaccttggccagaggtgctaagcagttggtggtgcagga

SEQ ID NO: 1484 - RNA, 41 nt, synthetic construct
  source 1..41: mol_type = other RNA
atgaccttggccaggggtgccaagccattggtggtgcagga

SEQ ID NO: 1485 - RNA, 41 nt, synthetic construct
  source 1..41: mol_type = other RNA
atgaccttggccaagggtgccaagcagttggtggtgcagga

SEQ ID NO: 1486 - RNA, 41 nt, synthetic construct
  source 1..41: mol_type = other RNA
caaagttgtcatggatgaccttggccaggggtgccgagcaa

SEQ ID NO: 1487 - RNA, 41 nt, synthetic construct
  source 1..41: mol_type = other RNA
caaagttgtcatggatgaccttggccatgggtaccaaggag

SEQ ID NO: 1488 - RNA, 41 nt, synthetic construct
  source 1..41: mol_type = other RNA
atgaccttggccaggggtgctaagcagatggtggtgcagga

SEQ ID NO: 1489 - RNA, 41 nt, synthetic construct
  source 1..41: mol_type = other RNA
ggatgccaagcaattggtggtgcaggaggcattgctgatga

SEQ ID NO: 1490 - RNA, 41 nt, synthetic construct
  source 1..41: mol_type = other RNA
atgaccttggccaggggtgttaagcagtgggtggtgcagga

SEQ ID NO: 1491 - RNA, 41 nt, synthetic construct
  source 1..41: mol_type = other RNA
caaagttgtcatggatgaccttggccaggggtgccaagcca

SEQ ID NO: 1492 - RNA, 41 nt, synthetic construct
  source 1..41: mol_type = other RNA
atgaccttggtcaggggtgttaagcagctagtggtgcagga

SEQ ID NO: 1493 - RNA, 41 nt, synthetic construct
  source 1..41: mol_type = other RNA
gggttccaagcattgtcaggtgcaggaggcattgctgatga

SEQ ID NO: 1494 - RNA, 41 nt, synthetic construct
  source 1..41: mol_type = other RNA
atgaccttgggcaggggtgttaagcagctgctggtgcagga

SEQ ID NO: 1495 - RNA, 43 nt, synthetic construct
  source 1..43: mol_type = other RNA
gggtgccaagcagatggtccggtgcaggaggcattgctgatga

SEQ ID NO: 1496 - RNA, 41 nt, synthetic construct
  source 1..41: mol_type = other RNA
gggtgccaaacaactggtggtgcaggaggcattgctgatga

SEQ ID NO: 1497 - RNA, 41 nt, synthetic construct
  source 1..41: mol_type = other RNA
gagtgctaaccagttggtggtgcaggaggcattgctgatga

SEQ ID NO: 1498 - RNA, 43 nt, synthetic construct
  source 1..43: mol_type = other RNA
caaagttgtcatggatgaccttggccaggggcctgtgaagcaa

SEQ ID NO: 1499 - RNA, 41 nt, synthetic construct
  source 1..41: mol_type = other RNA
gcgtgccaagcagttggtggtgcaggaggcattgctgatga

SEQ ID NO: 1500 - RNA, 41 nt, synthetic construct
  source 1..41: mol_type = other RNA
atgaccttggtcaggggtgtcaagcagttggtggtgcagga

SEQ ID NO: 1501 - RNA, 41 nt, synthetic construct
  source 1..41: mol_type = other RNA
gggtgccaagtggttggtggtgcaggaggcattgctgatga

SEQ ID NO: 1502 - RNA, 40 nt, synthetic construct
  source 1..40: mol_type = other RNA
caaagttgtcatggatgaccctggcaaggggtgctaagca

SEQ ID NO: 1503 - RNA, 41 nt, synthetic construct
  source 1..41: mol_type = other RNA
gggttccaagcgatccgtggtgcaggaggcattgctgatga

SEQ ID NO: 1504 - RNA, 52 nt, synthetic construct
  source 1..52: mol_type = other RNA
gggtgccaagcagaccaaaaataccaggtgttgcaggaggcattgctgatga

SEQ ID NO: 1505 - RNA, 41 nt, synthetic construct
  source 1..41: mol_type = other RNA
atgaccttggccaggggtgccaagcaatcggtggtgcagga

SEQ ID NO: 1506 - RNA, 41 nt, synthetic construct
  source 1..41: mol_type = other RNA
atgaccttggccaggggtgttaaccagttggtggtgcagga

SEQ ID NO: 1507 - RNA, 40 nt, synthetic construct
  source 1..40: mol_type = other RNA
caaagttgtcatggatgaccttggccagggtgctaagcag

SEQ ID NO: 1508 - RNA, 39 nt, synthetic construct
  source 1..39: mol_type = other RNA
caaagttgtcatggatgaccttggccaggggtgccaagg

SEQ ID NO: 1509 - RNA, 41 nt, synthetic construct
  source 1..41: mol_type = other RNA
atgaccttggccatgggtgccaagtggttggtggtgcagga

SEQ ID NO: 1510 - RNA, 41 nt, synthetic construct
  source 1..41: mol_type = other RNA
atgaccttggtcaggggtgccaagcagtccgtggtgcagga

SEQ ID NO: 1511 - RNA, 41 nt, synthetic construct
  source 1..41: mol_type = other RNA
gggtgccaagccattggtggtgcaggaggcattgctgatga

SEQ ID NO: 1512 - RNA, 40 nt, synthetic construct
  source 1..40: mol_type = other RNA
caaagttgtcatggatgaccttggccaggggtgttaagcc

SEQ ID NO: 1513 - RNA, 41 nt, synthetic construct
  source 1..41: mol_type = other RNA
gggtgtcaagcagtgggtggtgcaggaggcattgctgatga

SEQ ID NO: 1514 - RNA, 39 nt, synthetic construct
  source 1..39: mol_type = other RNA
atgaccttggctgggggtgtcaagcctggtggtgcagga

SEQ ID NO: 1515 - RNA, 41 nt, synthetic construct
  source 1..41: mol_type = other RNA
gggtaccaagcggtaggtggtgcaggaggcattgctgatga

SEQ ID NO: 1516 - RNA, 40 nt, synthetic construct
  source 1..40: mol_type = other RNA
ggatgccaacgtttggtggtgcaggaggcattgctgatga

SEQ ID NO: 1517 - RNA, 41 nt, synthetic construct
  source 1..41: mol_type = other RNA
atgaccttggaaaggggtctcaagcagttggtggtgcagga

SEQ ID NO: 1518 - RNA, 41 nt, synthetic construct
  source 1..41: mol_type = other RNA
caaagttgtcatggatgaccttagccaggggtgccaacttg

SEQ ID NO: 1519 - RNA, 41 nt, synthetic construct
  source 1..41: mol_type = other RNA
atgaccttggccaggggtgccaagccgttagtggtgcagga

SEQ ID NO: 1520 - RNA, 41 nt, synthetic construct
  source 1..41: mol_type = other RNA
caaagttgtcatggatgacctcggccaggggtgccaagcag

SEQ ID NO: 1521 - RNA, 41 nt, synthetic construct
  source 1..41: mol_type = other RNA
atgaccttggccaagggtgccaagcagtcggtggtgcagga

SEQ ID NO: 1522 - RNA, 43 nt, synthetic construct
  source 1..43: mol_type = other RNA
atgaccttggcaaagggtctgccaagcaaggagtggtgcagga

SEQ ID NO: 1523 - RNA, 41 nt, synthetic construct
  source 1..41: mol_type = other RNA
gggggccaagcagctggtggtgcaggaggcattgctgatga

SEQ ID NO: 1524 - RNA, 41 nt, synthetic construct
  source 1..41: mol_type = other RNA
gggtcgcaagcagttggtggtgcaggaggcattgctgatga

SEQ ID NO: 1525 - RNA, 42 nt, synthetic construct
  source 1..42: mol_type = other RNA
gggtgccaagcagttggtgcgtgcaggaggcattgctgatga

SEQ ID NO: 1526 - RNA, 41 nt, synthetic construct
  source 1..41: mol_type = other RNA
atgaccttggccaggggtgccaagcagcaggtggtgcagga

SEQ ID NO: 1527 - RNA, 41 nt, synthetic construct
  source 1..41: mol_type = other RNA
gggtgccaagcggtatgtggtgcaggaggcattgctgatga

SEQ ID NO: 1528 - RNA, 41 nt, synthetic construct
  source 1..41: mol_type = other RNA
caaagttgtcatggatgacctcggcccggggtgttaagcag

SEQ ID NO: 1529 - RNA, 41 nt, synthetic construct
  source 1..41: mol_type = other RNA
atgaccttggcaaggggtgccaagcagttggtggtgcagga

SEQ ID NO: 1530 - RNA, 39 nt, synthetic construct
  source 1..39: mol_type = other RNA
gggtgccaagcagtgtcgtgcaggaggcattgctgatga

SEQ ID NO: 1531 - RNA, 41 nt, synthetic construct
  source 1..41: mol_type = other RNA
gggtaccaacccgttggtggtgcaggaggcattgctgatga

SEQ ID NO: 1532 - RNA, 41 nt, synthetic construct
  source 1..41: mol_type = other RNA
atgaccttggccgggggtgctaaacaactggtggtgcagga

SEQ ID NO: 1533 - RNA, 41 nt, synthetic construct
  source 1..41: mol_type = other RNA
gggtgccaagcagttgatggtgcaggaggcattgctgatga

SEQ ID NO: 1534 - RNA, 41 nt, synthetic construct
  source 1..41: mol_type = other RNA
atgaccttggtcaggggtgttaagcagttggtggtgcagga

SEQ ID NO: 1535 - RNA, 41 nt, synthetic construct
  source 1..41: mol_type = other RNA
atgaccttggcaaggggtgtcaagcagttggtggtgcagga

SEQ ID NO: 1536 - RNA, 46 nt, synthetic construct
  source 1..46: mol_type = other RNA
caaagttgtcatggatgaccttggccaggaaccccgctgctagcag

SEQ ID NO: 1537 - RNA, 40 nt, synthetic construct
  source 1..40: mol_type = other RNA
gggtgtcaagcagtttaggtgcaggaggcattgctgatga

SEQ ID NO: 1538 - RNA, 41 nt, synthetic construct
  source 1..41: mol_type = other RNA
caaagttgtcatggatgaccttggccaggggtgctaagctg

SEQ ID NO: 1539 - RNA, 41 nt, synthetic construct
  source 1..41: mol_type = other RNA
atgaccttggccaggggtgccaagcagtgagtggtgcagga

SEQ ID NO: 1540 - RNA, 41 nt, synthetic construct
  source 1..41: mol_type = other RNA
atgaccttggccaggggtgtcaagcagttggtggtgcagga

SEQ ID NO: 1541 - RNA, 42 nt, synthetic construct
  source 1..42: mol_type = other RNA
ggagtgccaaggagttggtggtgcaggaggcattgctgatga

SEQ ID NO: 1542 - RNA, 41 nt, synthetic construct
  source 1..41: mol_type = other RNA
aggtgccaagcagctgctggtgcaggaggcattgctgatga

SEQ ID NO: 1543 - RNA, 41 nt, synthetic construct
  source 1..41: mol_type = other RNA
gggtgccaagcggtaaaaggtgcaggaggcattgctgatga

SEQ ID NO: 1544 - RNA, 41 nt, synthetic construct
  source 1..41: mol_type = other RNA
caaagttgtcatggatgaccttggctaggagtgctaaccag

SEQ ID NO: 1545 - RNA, 39 nt, synthetic construct
  source 1..39: mol_type = other RNA
atgaccttggccaagggtgccaagattggtggtgcagga

SEQ ID NO: 1546 - RNA, 41 nt, synthetic construct
  source 1..41: mol_type = other RNA
gggtgccaagctgttggtggtgcaggaggcattgctgatga

SEQ ID NO: 1547 - RNA, 39 nt, synthetic construct
  source 1..39: mol_type = other RNA
caaagttgtcatggatgaccttggccaagggtgctaagg

SEQ ID NO: 1548 - RNA, 41 nt, synthetic construct
  source 1..41: mol_type = other RNA
atgaccttggacgtgggtgccaagtagttggtggtgcagga

SEQ ID NO: 1549 - RNA, 41 nt, synthetic construct
  source 1..41: mol_type = other RNA
gggtgtcaagcagtccgcggagcaggaggcattgctgatga

SEQ ID NO: 1550 - RNA, 41 nt, synthetic construct
  source 1..41: mol_type = other RNA
gggtgccaagcagtccgtggtgcaggaggcattgctgatga

SEQ ID NO: 1551 - RNA, 41 nt, synthetic construct
  source 1..41: mol_type = other RNA
atgaccttggccaggggtgccaagcagttgctggtgcagga

SEQ ID NO: 1552 - RNA, 41 nt, synthetic construct
  source 1..41: mol_type = other RNA
caaagttgtcatggatgaccttggccaggggtgctgagcag

SEQ ID NO: 1553 - RNA, 41 nt, synthetic construct
  source 1..41: mol_type = other RNA
caaagttgtcatggatgaccttgggcatgggtgacaagcag

SEQ ID NO: 1554 - RNA, 39 nt, synthetic construct
  source 1..39: mol_type = other RNA
atgaccttggccagggcttgccaagcctttggtgcagga

SEQ ID NO: 1555 - RNA, 41 nt, synthetic construct
  source 1..41: mol_type = other RNA
atgaccttggccaggggtgtcaaccagttggtggtgcagga

SEQ ID NO: 1556 - RNA, 41 nt, synthetic construct
  source 1..41: mol_type = other RNA
gggtgccaagcagttgctggtgcaggaggcattgctgatga

SEQ ID NO: 1557 - RNA, 42 nt, synthetic construct
  source 1..42: mol_type = other RNA
caaagttgtcatggatgaccttggccaggggtgccaaagcgg

SEQ ID NO: 1558 - RNA, 41 nt, synthetic construct
  source 1..41: mol_type = other RNA
aggtgctaagcagttggtggtgcaggaggcattgctgatga

SEQ ID NO: 1559 - RNA, 41 nt, synthetic construct
  source 1..41: mol_type = other RNA
caaagttgtcatggatgaccttggccaggggtgccaagccg

SEQ ID NO: 1560 - RNA, 41 nt, synthetic construct
  source 1..41: mol_type = other RNA
caaagttgtcatggatgaccttggccaggggtgccgagcag

SEQ ID NO: 1561 - RNA, 40 nt, synthetic construct
  source 1..40: mol_type = other RNA
atgaccttggccagggtgctaagcagttggtggtgcagga

SEQ ID NO: 1562 - RNA, 41 nt, synthetic construct
  source 1..41: mol_type = other RNA
caaagttgtcatggatgaccttggccaggggtgccaagaag

SEQ ID NO: 1563 - RNA, 41 nt, synthetic construct
  source 1..41: mol_type = other RNA
atgaccttggccaggggtgccaagccgttggtggtgcagga

SEQ ID NO: 1564 - RNA, 41 nt, synthetic construct
  source 1..41: mol_type = other RNA
atgaccttggccgggggtgccaagcaattggtggtgcagga

SEQ ID NO: 1565 - RNA, 41 nt, synthetic construct
  source 1..41: mol_type = other RNA
gggtgccaagcattcggtggtgcaggaggcattgctgatga

SEQ ID NO: 1566 - RNA, 41 nt, synthetic construct
  source 1..41: mol_type = other RNA
gggcgccaaggaactggtggagcaggaggcattgctgatga

SEQ ID NO: 1567 - RNA, 41 nt, synthetic construct
  source 1..41: mol_type = other RNA
gggtgccaagcagtcggtggagcaggaggcattgctgatga

SEQ ID NO: 1568 - RNA, 41 nt, synthetic construct
  source 1..41: mol_type = other RNA
gagtgccaagcagcgcgtggtgcaggaggcattgctgatga

SEQ ID NO: 1569 - RNA, 41 nt, synthetic construct
  source 1..41: mol_type = other RNA
caaagttgtcatggatgaccttggtcagggggtgcaagcag

SEQ ID NO: 1570 - RNA, 41 nt, synthetic construct
  source 1..41: mol_type = other RNA
atgaccttggcccggggtgttaagcagtccgtggtgcagga

SEQ ID NO: 1571 - RNA, 41 nt, synthetic construct
  source 1..41: mol_type = other RNA
ggatgccaagcaggtggtggtgcaggaggcattgctgatga

SEQ ID NO: 1572 - RNA, 38 nt, synthetic construct
  source 1..38: mol_type = other RNA
atgaccttgggcaagggtgtcaagcaggtggtgcagga

SEQ ID NO: 1573 - RNA, 41 nt, synthetic construct
  source 1..41: mol_type = other RNA
atgaccttggtcaggggtgtcaagcagctagtggtgcagga

SEQ ID NO: 1574 - RNA, 41 nt, synthetic construct
  source 1..41: mol_type = other RNA
gggtgccaagcagttggtcgtgcaggaggcattgctgatga

SEQ ID NO: 1575 - RNA, 41 nt, synthetic construct
  source 1..41: mol_type = other RNA
atgaccttggccaggggtgccaagcagatggtggtgcagga

SEQ ID NO: 1576 - RNA, 41 nt, synthetic construct
  source 1..41: mol_type = other RNA
gggtgccaagcagttcgtggtgcaggaggcattgctgatga

SEQ ID NO: 1577 - RNA, 41 nt, synthetic construct
  source 1..41: mol_type = other RNA
gggtgtcaagcagttgtgagtgcaggaggcattgctgatga

SEQ ID NO: 1578 - RNA, 41 nt, synthetic construct
  source 1..41: mol_type = other RNA
caaagttgtcatggatgaccttggccaggggtgctgagcaa

SEQ ID NO: 1579 - RNA, 41 nt, synthetic construct
  source 1..41: mol_type = other RNA
atgaccttggccaggctgcccaagaagtcagtggtgcagga

SEQ ID NO: 1580 - RNA, 42 nt, synthetic construct
  source 1..42: mol_type = other RNA
gactgctaagcagttggtaggtgcaggaggcattgctgatga

SEQ ID NO: 1581 - RNA, 41 nt, synthetic construct
  source 1..41: mol_type = other RNA
gggtaccaaggagtaggtggtgcaggaggcattgctgatga

SEQ ID NO: 1582 - RNA, 41 nt, synthetic construct
  source 1..41: mol_type = other RNA
ggttgccgagcagttggtggtgcaggaggcattgctgatga

SEQ ID NO: 1583 - RNA, 38 nt, synthetic construct
  source 1..38: mol_type = other RNA
gggtgtcaagcaggtggtgcaggaggcattgctgatga

SEQ ID NO: 1584 - RNA, 41 nt, synthetic construct
  source 1..41: mol_type = other RNA
gggtgccaagcagttgctaatgcaggaggcattgctgatga

SEQ ID NO: 1585 - RNA, 40 nt, synthetic construct
  source 1..40: mol_type = other RNA
gggtgccaagcagctagtgtgcaggaggcattgctgatga

SEQ ID NO: 1586 - RNA, 41 nt, synthetic construct
  source 1..41: mol_type = other RNA
atgaccttggccaggggtgctaagcagtgagtggtgcagga

SEQ ID NO: 1587 - RNA, 39 nt, synthetic construct
  source 1..39: mol_type = other RNA
gggtgccaagcacggtcgtgcaggaggcattgctgatga

SEQ ID NO: 1588 - RNA, 41 nt, synthetic construct
  source 1..41: mol_type = other RNA
aggtgccaagctgtcagtggtgcaggaggcattgctgatga

SEQ ID NO: 1589 - RNA, 41 nt, synthetic construct
  source 1..41: mol_type = other RNA
gggtgttaagcagctgccggtgcaggaggcattgctgatga

SEQ ID NO: 1590 - RNA, 40 nt, synthetic construct
  source 1..40: mol_type = other RNA
gggtgctaacagttggtggtgcaggaggcattgctgatga

SEQ ID NO: 1591 - RNA, 44 nt, synthetic construct
  source 1..44: mol_type = other RNA
atgaccttggccaggggtgccaagcgagccacggtggtgcagga

SEQ ID NO: 1592 - RNA, 41 nt, synthetic construct
  source 1..41: mol_type = other RNA
atgaccttggaaaggggtcgtaagcagttggtggtgcagga

SEQ ID NO: 1593 - RNA, 41 nt, synthetic construct
  source 1..41: mol_type = other RNA
gggtgccaagcagtcggtggtgcaggaggcattgctgatga

SEQ ID NO: 1594 - RNA, 41 nt, synthetic construct
  source 1..41: mol_type = other RNA
ggatgttaagcagttgacggtgcaggaggcattgctgatga

SEQ ID NO: 1595 - RNA, 40 nt, synthetic construct
  source 1..40: mol_type = other RNA
atgaccttggccaagggtgctaacagttggtggtgcagga

SEQ ID NO: 1596 - RNA, 41 nt, synthetic construct
  source 1..41: mol_type = other RNA
gcgtgccgagcaggtggttgtgcaggaggcattgctgatga

SEQ ID NO: 1597 - RNA, 40 nt, synthetic construct
  source 1..40: mol_type = other RNA
ggtgccaagcagggaatggtgcaggaggcattgctgatga

SEQ ID NO: 1598 - RNA, 39 nt, synthetic construct
  source 1..39: mol_type = other RNA
atgaccttggctgggggtgttaagcctggtggtgcagga

SEQ ID NO: 1599 - RNA, 41 nt, synthetic construct
  source 1..41: mol_type = other RNA
gggtgccaagtagttggtagtgcaggaggcattgctgatga

SEQ ID NO: 1600 - RNA, 41 nt, synthetic construct
  source 1..41: mol_type = other RNA
caaagttgtcatggatgaccttgggcaagggtgacaagcag

SEQ ID NO: 1601 - RNA, 41 nt, synthetic construct
  source 1..41: mol_type = other RNA
ggatgtcaagcagttgacggtgcaggaggcattgctgatga

SEQ ID NO: 1602 - RNA, 41 nt, synthetic construct
  source 1..41: mol_type = other RNA
caaagttgtcatggatgaccttggccagggttgccgagcag

SEQ ID NO: 1603 - RNA, 41 nt, synthetic construct
  source 1..41: mol_type = other RNA
atgaccttggccaggggtgccaagagtttggtggtgcagga

SEQ ID NO: 1604 - RNA, 41 nt, synthetic construct
  source 1..41: mol_type = other RNA
ggggtgcaagcagttggtggtgcaggaggcattgctgatga

SEQ ID NO: 1605 - RNA, 41 nt, synthetic construct
  source 1..41: mol_type = other RNA
gggtgccaagctctcggtggtgcaggaggcattgctgatga

SEQ ID NO: 1606 - RNA, 41 nt, synthetic construct
  source 1..41: mol_type = other RNA
gggtgccaagcaatcggtggtgcaggaggcattgctgatga

SEQ ID NO: 1607 - RNA, 41 nt, synthetic construct
  source 1..41: mol_type = other RNA
gagcgccaagcagctggcggtgcaggaggcattgctgatga

SEQ ID NO: 1608 - RNA, 41 nt, synthetic construct
  source 1..41: mol_type = other RNA
cggttgccagcggttggtggtgcaggaggcattgctgatga

SEQ ID NO: 1609 - RNA, 39 nt, synthetic construct
  source 1..39: mol_type = other RNA
gggtgtcaagcctggtggtgcaggaggcattgctgatga

SEQ ID NO: 1610 - RNA, 41 nt, synthetic construct
  source 1..41: mol_type = other RNA
gggtgctaagctgttggtggtgcaggaggcattgctgatga

SEQ ID NO: 1611 - RNA, 41 nt, synthetic construct
  source 1..41: mol_type = other RNA
gggtgccaagcagtaggtggtgcaggaggcattgctgatga

SEQ ID NO: 1612 - RNA, 42 nt, synthetic construct
  source 1..42: mol_type = other RNA
gggcagccaagcagctggtggtgcaggaggcattgctgatga

SEQ ID NO: 1613 - RNA, 42 nt, synthetic construct
  source 1..42: mol_type = other RNA
gggtgccaagcagttgagtagtgcaggaggcattgctgatga

SEQ ID NO: 1614 - RNA, 41 nt, synthetic construct
  source 1..41: mol_type = other RNA
gggcgccaagcagttggtggtgcaggaggcattgctgatga

SEQ ID NO: 1615 - RNA, 41 nt, synthetic construct
  source 1..41: mol_type = other RNA
atgaccttggccaggggtgtcaagcaaatcgtggtgcagga

SEQ ID NO: 1616 - RNA, 41 nt, synthetic construct
  source 1..41: mol_type = other RNA
gggtgccaagcagtgagtggtgcaggaggcattgctgatga

SEQ ID NO: 1617 - RNA, 41 nt, synthetic construct
  source 1..41: mol_type = other RNA
gggtgccaagccgttggtggtgcaggaggcattgctgatga

SEQ ID NO: 1618 - RNA, 40 nt, synthetic construct
  source 1..40: mol_type = other RNA
gggtgccaagggttggtggtgcaggaggcattgctgatga

SEQ ID NO: 1619 - RNA, 41 nt, synthetic construct
  source 1..41: mol_type = other RNA
gggtgccaagcagtccccggtgcaggaggcattgctgatga

SEQ ID NO: 1620 - RNA, 44 nt, synthetic construct
  source 1..44: mol_type = other RNA
ggtgccaagcagttgggaaaaggtgcaggaggcattgctgatga

SEQ ID NO: 1621 - RNA, 41 nt, synthetic construct
  source 1..41: mol_type = other RNA
ggccgccaagcagtcggtggtgcaggaggcattgctgatga

SEQ ID NO: 1622 - RNA, 41 nt, synthetic construct
  source 1..41: mol_type = other RNA
caaagttgtcatggatgaccttggaaaggggtcgcaagcag

SEQ ID NO: 1623 - RNA, 41 nt, synthetic construct
  source 1..41: mol_type = other RNA
atgaccttggccaggggtgtcaatcagttggtggtgcagga

SEQ ID NO: 1624 - RNA, 42 nt, synthetic construct
  source 1..42: mol_type = other RNA
ggggtgccaagcagttggtggtgcaggaggcattgctgatga

SEQ ID NO: 1625 - RNA, 41 nt, synthetic construct
  source 1..41: mol_type = other RNA
gggtgtcaaccagttggcggtgcaggaggcattgctgatga

SEQ ID NO: 1626 - RNA, 42 nt, synthetic construct
  source 1..42: mol_type = other RNA
gggtgccaagcagttggtcaatgcaggaggcattgctgatga

SEQ ID NO: 1627 - RNA, 41 nt, synthetic construct
  source 1..41: mol_type = other RNA
gggttccaagcagttggtcgtgcaggaggcattgctgatga

SEQ ID NO: 1628 - RNA, 41 nt, synthetic construct
  source 1..41: mol_type = other RNA
atgaccttggcctgggatgccacgcaggtggtggtgcagga

SEQ ID NO: 1629 - RNA, 41 nt, synthetic construct
  source 1..41: mol_type = other RNA
gggtgccaacttgtcggcggtgcaggaggcattgctgatga

SEQ ID NO: 1630 - RNA, 39 nt, synthetic construct
  source 1..39: mol_type = other RNA
atgaccttggccgggggtgccaagcacggtggtgcagga

SEQ ID NO: 1631 - RNA, 41 nt, synthetic construct
  source 1..41: mol_type = other RNA
ggttgctgagcagttggtggtgcaggaggcattgctgatga

SEQ ID NO: 1632 - RNA, 40 nt, synthetic construct
  source 1..40: mol_type = other RNA
atgaccttggccggggttccaagcagttggtggtgcagga

SEQ ID NO: 1633 - RNA, 41 nt, synthetic construct
  source 1..41: mol_type = other RNA
gggtgccaagagtttggtggtgcaggaggcattgctgatga

SEQ ID NO: 1634 - RNA, 40 nt, synthetic construct
  source 1..40: mol_type = other RNA
atgaccttggccgggggtgccaacagttggtggtgcagga

SEQ ID NO: 1635 - RNA, 41 nt, synthetic construct
  source 1..41: mol_type = other RNA
gggtgccacgcagttggtggtgcaggaggcattgctgatga

SEQ ID NO: 1636 - RNA, 41 nt, synthetic construct
  source 1..41: mol_type = other RNA
atgaccttggccaagggtgccaagcggttggtggtgcagga

SEQ ID NO: 1637 - RNA, 43 nt, synthetic construct
  source 1..43: mol_type = other RNA
cggggtgccaagcagttggtggtgcaggaggcattgctgatga

SEQ ID NO: 1638 - RNA, 41 nt, synthetic construct
  source 1..41: mol_type = other RNA
gggtgtcaagcagtggttggtgcaggaggcattgctgatga

SEQ ID NO: 1639 - RNA, 41 nt, synthetic construct
  source 1..41: mol_type = other RNA
atgaccttggccaggggtgtcaagcagtgggtggtgcagga

SEQ ID NO: 1640 - RNA, 43 nt, synthetic construct
  source 1..43: mol_type = other RNA
gggtgtcaagcagttgtaggggtgcaggaggcattgctgatga

SEQ ID NO: 1641 - RNA, 41 nt, synthetic construct
  source 1..41: mol_type = other RNA
gggtgtcaagcagctgccggtgcaggaggcattgctgatga

SEQ ID NO: 1642 - RNA, 41 nt, synthetic construct
  source 1..41: mol_type = other RNA
atgaccttggccaggggtgccaagcggttagtggtgcagga

SEQ ID NO: 1643 - RNA, 41 nt, synthetic construct
  source 1..41: mol_type = other RNA
gggtgccaagcagttggtggtgcaggaggcattgctgatga

SEQ ID NO: 1644 - RNA, 41 nt, synthetic construct
  source 1..41: mol_type = other RNA
gggtgttaaccagttggcggtgcaggaggcattgctgatga

SEQ ID NO: 1645 - RNA, 40 nt, synthetic construct
  source 1..40: mol_type = other RNA
atgaccttggccaggggcctgtcaagcaagtggtgcagga

SEQ ID NO: 1646 - RNA, 56 nt, synthetic construct
  source 1..56: mol_type = other RNA
gggcgccaagcaattcggatcacctgagatcagtgtgcaggaggcattgctgatga

SEQ ID NO: 1647 - RNA, 41 nt, synthetic construct
  source 1..41: mol_type = other RNA
caaagttgtcatggatgacctcggccaggggtgttaaccag

SEQ ID NO: 1648 - RNA, 41 nt, synthetic construct
  source 1..41: mol_type = other RNA
gggtgccaagcattgtgtagtgcaggaggcattgctgatga

SEQ ID NO: 1649 - RNA, 41 nt, synthetic construct
  source 1..41: mol_type = other RNA
gggtgtcaagcagctggtggtgcaggaggcattgctgatga

SEQ ID NO: 1650 - RNA, 41 nt, synthetic construct
  source 1..41: mol_type = other RNA
gggtgtcaagcagctagtggtgcaggaggcattgctgatga

SEQ ID NO: 1651 - RNA, 41 nt, synthetic construct
  source 1..41: mol_type = other RNA
caaagttgtcatggatgaccttagccaggggtgccacgcag

SEQ ID NO: 1652 - RNA, 38 nt, synthetic construct
  source 1..38: mol_type = other RNA
gggtgtcaagcagtgggtgcaggaggcattgctgatga

SEQ ID NO: 1653 - RNA, 41 nt, synthetic construct
  source 1..41: mol_type = other RNA
gggtgctaagcagtgagtggtgcaggaggcattgctgatga

SEQ ID NO: 1654 - RNA, 41 nt, synthetic construct
  source 1..41: mol_type = other RNA
gggtgccaagaagttggtggtgcaggaggcattgctgatga

SEQ ID NO: 1655 - RNA, 41 nt, synthetic construct
  source 1..41: mol_type = other RNA
gggtgctaagcagtcggtggtgcaggaggcattgctgatga

SEQ ID NO: 1656 - RNA, 41 nt, synthetic construct
  source 1..41: mol_type = other RNA
caaagttgtcatggatgaccttggccaggggtaccaacccg

SEQ ID NO: 1657 - RNA, 41 nt, synthetic construct
  source 1..41: mol_type = other RNA
gggtaccaagcggttggtggtgcaggaggcattgctgatga

SEQ ID NO: 1658 - RNA, 38 nt, synthetic construct
  source 1..38: mol_type = other RNA
gggtgttaagcaggtggtgcaggaggcattgctgatga

SEQ ID NO: 1659 - RNA, 41 nt, synthetic construct
  source 1..41: mol_type = other RNA
atgaccttggccaggactgctaaacagttcttggtgcagga

SEQ ID NO: 1660 - RNA, 40 nt, synthetic construct
  source 1..40: mol_type = other RNA
atgaccttggccaggggtgccaagggttggtggtgcagga

SEQ ID NO: 1661 - RNA, 46 nt, synthetic construct
  source 1..46: mol_type = other RNA
caaagttgtcatggatgaccttggccaggaaccccgctgccagcag

SEQ ID NO: 1662 - RNA, 41 nt, synthetic construct
  source 1..41: mol_type = other RNA
gggtgtcaagcagtcggcggtgcaggaggcattgctgatga

SEQ ID NO: 1663 - RNA, 41 nt, synthetic construct
  source 1..41: mol_type = other RNA
gtgtgccgacttgtcggtggtgcaggaggcattgctgatga

SEQ ID NO: 1664 - RNA, 41 nt, synthetic construct
  source 1..41: mol_type = other RNA
gggtctcaagcagttggtggtgcaggaggcattgctgatga

SEQ ID NO: 1665 - RNA, 42 nt, synthetic construct
  source 1..42: mol_type = other RNA
atgaccttggcccggggtgttaagcccagttatggtgcagga

SEQ ID NO: 1666 - RNA, 41 nt, synthetic construct
  source 1..41: mol_type = other RNA
gggtgtcaagcaattcgtggtgcaggaggcattgctgatga

SEQ ID NO: 1667 - RNA, 41 nt, synthetic construct
  source 1..41: mol_type = other RNA
gggtgccaagcattggatggtgcaggaggcattgctgatga

SEQ ID NO: 1668 - RNA, 41 nt, synthetic construct
  source 1..41: mol_type = other RNA
gggtgccaagcagttggttgtgcaggaggcattgctgatga

SEQ ID NO: 1669 - RNA, 40 nt, synthetic construct
  source 1..40: mol_type = other RNA
gggtgccaacagttggtggtgcaggaggcattgctgatga

SEQ ID NO: 1670 - RNA, 41 nt, synthetic construct
  source 1..41: mol_type = other RNA
caaagttgtcatggatgaccttggccatgggtggcgagcta

SEQ ID NO: 1671 - RNA, 41 nt, synthetic construct
  source 1..41: mol_type = other RNA
caaagttgtcatggatgaccttggccaagggtggcgagcta

SEQ ID NO: 1672 - RNA, 41 nt, synthetic construct
  source 1..41: mol_type = other RNA
gcgtgccaagcaggcagtggtgcaggaggcattgctgatga

SEQ ID NO: 1673 - RNA, 41 nt, synthetic construct
  source 1..41: mol_type = other RNA
gggtgccaagcagttggtagtgcaggaggcattgctgatga

SEQ ID NO: 1674 - RNA, 41 nt, synthetic construct
  source 1..41: mol_type = other RNA
gggtgccaagccgttagtggtgcaggaggcattgctgatga

SEQ ID NO: 1675 - RNA, 41 nt, synthetic construct
  source 1..41: mol_type = other RNA
gggtgccaagtagttggtggtgcaggaggcattgctgatga

SEQ ID NO: 1676 - RNA, 41 nt, synthetic construct
  source 1..41: mol_type = other RNA
atgaccttggcaaggggtgctaagcggtaagtggtgcagga

SEQ ID NO: 1677 - RNA, 41 nt, synthetic construct
  source 1..41: mol_type = other RNA
gggtgccaagcggttggtggtgcaggaggcattgctgatga

SEQ ID NO: 1678 - RNA, 40 nt, synthetic construct
  source 1..40: mol_type = other RNA
gggtgccaacagttggtggggcaggaggcattgctgatga

SEQ ID NO: 1679 - RNA, 43 nt, synthetic construct
  source 1..43: mol_type = other RNA
caaagttgtcatggatgaccttggccagcagggttgccagtgg

SEQ ID NO: 1680 - RNA, 41 nt, synthetic construct
  source 1..41: mol_type = other RNA
tggtgccaagcggtcggtgatgcaggaggcattgctgatga

SEQ ID NO: 1681 - RNA, 38 nt, synthetic construct
  source 1..38: mol_type = other RNA
atgaccttgggcaagggtgttaagcaggtggtgcagga

SEQ ID NO: 1682 - RNA, 41 nt, synthetic construct
  source 1..41: mol_type = other RNA
gggtgccaaacagttggtggtgcaggaggcattgctgatga

SEQ ID NO: 1683 - RNA, 43 nt, synthetic construct
  source 1..43: mol_type = other RNA
taaagtgctgagcagttgatggtgcaggaggcattgctgatga

SEQ ID NO: 1684 - RNA, 43 nt, synthetic construct; identical to SEQ ID NO: 1683
  source 1..43: mol_type = other RNA

SEQ ID NO: 1685 - RNA, 41 nt, synthetic construct
  source 1..41: mol_type = other RNA
gggtgttaagcagtccgcggagcaggaggcattgctgatga

SEQ ID NO: 1686 - RNA, 41 nt, synthetic construct
  source 1..41: mol_type = other RNA
gggtgccaagcagatggtggtgcaggaggcattgctgatga

SEQ ID NO: 1687 - RNA, 40 nt, synthetic construct
  source 1..40: mol_type = other RNA
atgaccttggccaggggtgtcaagcagtggtggtgcagga

SEQ ID NO: 1688 - RNA, 41 nt, synthetic construct
  source 1..41: mol_type = other RNA
caaagttgtcatggatgaccttgtccaggctgcccaagaag

SEQ ID NO: 1689 - RNA, 41 nt, synthetic construct
  source 1..41: mol_type = other RNA
gagtgccaagcagttggtggtgcaggaggcattgctgatga

SEQ ID NO: 1690 - RNA, 41 nt, synthetic construct
  source 1..41: mol_type = other RNA
atgaccttggccagggttgctgagcagttggtggtgcagga

SEQ ID NO: 1691 - RNA, 41 nt, synthetic construct
  source 1..41: mol_type = other RNA
gggtgctaagaagttggtggtgcaggaggcattgctgatga

SEQ ID NO: 1692 - RNA, 41 nt, synthetic construct
  source 1..41: mol_type = other RNA
cggttgctagcggttggtggtgcaggaggcattgctgatga

SEQ ID NO: 1693 - RNA, 41 nt, synthetic construct
  source 1..41: mol_type = other RNA
caaagttgtcatggatgaccttggcctggggctgcatgcag

SEQ ID NO: 1694 - RNA, 41 nt, synthetic construct
  source 1..41: mol_type = other RNA
atgaccttggccaggggtgccaagcagttggtggtgcagga

SEQ ID NO: 1695 - RNA, 39 nt, synthetic construct
  source 1..39: mol_type = other RNA
gggtgttaagcctggtggtgcaggaggcattgctgatga

SEQ ID NO: 1696 - RNA, 41 nt, synthetic construct
  source 1..41: mol_type = other RNA
gggttccaagcagttggtggtgcaggaggcattgctgatga

SEQ ID NO: 1697 - RNA, 41 nt, synthetic construct
  source 1..41: mol_type = other RNA
caaagttgtcatggatgacctcggccaggggtgtcaaccag

SEQ ID NO: 1698 - RNA, 41 nt, synthetic construct
  source 1..41: mol_type = other RNA
gggtgctaagcattggatggtgcaggaggcattgctgatga

SEQ ID NO: 1699 - RNA, 41 nt, synthetic construct
  source 1..41: mol_type = other RNA
atgaccttggccagcggttgccagcggttggtggtgcagga

SEQ ID NO: 1700 - RNA, 43 nt, synthetic construct
  source 1..43: mol_type = other RNA
caaagttgtcatggatgaccttggccagcagggttgctagtgg

SEQ ID NO: 1701 - RNA, 44 nt, synthetic construct
  source 1..44: mol_type = other RNA
ggtctgccaaacagttctacaggtgcaggaggcattgctgatga

SEQ ID NO: 1702 - RNA, 41 nt, synthetic construct
  source 1..41: mol_type = other RNA
atgaccttggccaagggtgctaaacagttgctggtgcagga

SEQ ID NO: 1703 - RNA, 41 nt, synthetic construct
  source 1..41: mol_type = other RNA
caaagttgtcatggatgaccttggccagcggttgctagcgg

SEQ ID NO: 1704 - RNA, 41 nt, synthetic construct
  source 1..41: mol_type = other RNA
gggcagcaagcagctggtggtgcaggaggcattgctgatga

SEQ ID NO: 1705 - RNA, 41 nt, synthetic construct
  source 1..41: mol_type = other RNA
caaagttgtcatggatgaccttggcgaggggcagcaagcag

SEQ ID NO: 1706 - RNA, 41 nt, synthetic construct
  source 1..41: mol_type = other RNA
gggtgtcaagcagttggtggtgcaggaggcattgctgatga

SEQ ID NO: 1707 - RNA, 41 nt, synthetic construct
  source 1..41: mol_type = other RNA
gggtgccaagcagtgggtaatgcaggaggcattgctgatga

SEQ ID NO: 1708 - RNA, 39 nt, synthetic construct
  source 1..39: mol_type = other RNA
atgaccttggccaagggtgccaaggttggtggtgcagga

SEQ ID NO: 1709 - RNA, 39 nt, synthetic construct
  source 1..39: mol_type = other RNA
gggtgccaagattggtggtgcaggaggcattgctgatga

SEQ ID NO: 1710 - RNA, 41 nt, synthetic construct
  source 1..41: mol_type = other RNA
atgaccttggccaagggtgccaagtggttggtggtgcagga

SEQ ID NO: 1711 - RNA, 41 nt, synthetic construct
  source 1..41: mol_type = other RNA
gggtgctaagtagttggtagtgcaggaggcattgctgatga

SEQ ID NO: 1712 - RNA, 41 nt, synthetic construct
  source 1..41: mol_type = other RNA
atgaccttggccaggggtgccaagcattcggtggtgcagga

SEQ ID NO: 1713 - RNA, 41 nt, synthetic construct
  source 1..41: mol_type = other RNA
caaagttgtcatggatgaccttggccagcggttgccagcgg

SEQ ID NO: 1714 - RNA, 41 nt, synthetic construct
  source 1..41: mol_type = other RNA
aggtgccaagcagttggtggtgcaggaggcattgctgatga

SEQ ID NO: 1715 - RNA, 41 nt, synthetic construct
  source 1..41: mol_type = other RNA
gggtgccaagcggctggtggtgcaggaggcattgctgatga

SEQ ID NO: 1716 - RNA, 41 nt, synthetic construct
  source 1..41: mol_type = other RNA
gggtgtcaagcggtcggtggtgcaggaggcattgctgatga

SEQ ID NO: 1717 - RNA, 43 nt, synthetic construct
  source 1..43: mol_type = other RNA
gggtctgccaagcaaggagtaatgcaggaggcattgctgatga

SEQ ID NO: 1718 - RNA, 44 nt, synthetic construct
  source 1..44: mol_type = other RNA
atgaccttggctaggggtgtcaagcagttgtaggtggtgcagga

SEQ ID NO: 1719 - RNA, 40 nt, synthetic construct
  source 1..40: mol_type = other RNA
caaagttgtcatggatgaccttggccaggggtccgagcag

SEQ ID NO: 1720 - RNA, 41 nt, synthetic construct
  source 1..41: mol_type = other RNA
gtgtgccaagcggtcagtggtgcaggaggcattgctgatga

SEQ ID NO: 1721 - RNA, 41 nt, synthetic construct
  source 1..41: mol_type = other RNA
gggtgccaaggagttggtggtgcaggaggcattgctgatga

SEQ ID NO: 1722 - RNA, 41 nt, synthetic construct
  source 1..41: mol_type = other RNA
gggtaccgagcagttgctggtgcaggaggcattgctgatga

SEQ ID NO: 1723 - RNA, 41 nt, synthetic construct
  source 1..41: mol_type = other RNA
caaagttgtcatggatgaccttggccagggttgctgagcag

SEQ ID NO: 1724 - RNA, 39 nt, synthetic construct
  source 1..39: mol_type = other RNA
atgaccttggccgggggtgccaaggttggtggtgcagga

SEQ ID NO: 1725 - RNA, 41 nt, synthetic construct
  source 1..41: mol_type = other RNA
atgaccttggccaggggtgctaagcagtcggtggtgcagga

SEQ ID NO: 1726 - RNA, 41 nt, synthetic construct
  source 1..41: mol_type = other RNA
atgaccttggttaggagagccatgcacttagtggtgcagga

SEQ ID NO: 1727 - RNA, 41 nt, synthetic construct
  source 1..41: mol_type = other RNA
gggtgctaagcagtccgtggtgcaggaggcattgctgatga

SEQ ID NO: 1728 - RNA, 41 nt, synthetic construct
  source 1..41: mol_type = other RNA
gggtgctaagcagttcgtggtgcaggaggcattgctgatga

SEQ ID NO: 1729 - RNA, 41 nt, synthetic construct
  source 1..41: mol_type = other RNA
atgaccttggccaggggtgccaacttgtcggtggtgcagga

SEQ ID NO: 1730 - RNA, 39 nt, synthetic construct
  source 1..39: mol_type = other RNA
gggtgccaagctgttggtggcaggaggcattgctgatga

SEQ ID NO: 1731 - RNA, 43 nt, synthetic construct
  source 1..43: mol_type = other RNA
gggtgctaagcagatggtccggtgcaggaggcattgctgatga

SEQ ID NO: 1732 - RNA, 41 nt, synthetic construct
  source 1..41: mol_type = other RNA
gggtgttaagcagttggtggtgcaggaggcattgctgatga

SEQ ID NO: 1733 - RNA, 41 nt, synthetic construct
  source 1..41: mol_type = other RNA
atgaccttggccaggggtgccaagcagtcggtggtgcagga

SEQ ID NO: 1734 - RNA, 41 nt, synthetic construct
  source 1..41: mol_type = other RNA
gggttccaagcggttggtggtgcaggaggcattgctgatga

SEQ ID NO: 1735 - RNA, 39 nt, synthetic construct
  source 1..39: mol_type = other RNA
gggtgctaaggttggtggtgcaggaggcattgctgatga

SEQ ID NO: 1736 - RNA, 41 nt, synthetic construct
  source 1..41: mol_type = other RNA
atgaccttggccaggggtgctgagcaattggtggtgcagga

SEQ ID NO: 1737 - RNA, 40 nt, synthetic construct
  source 1..40: mol_type = other RNA
gggtgctaacagttggtggggcaggaggcattgctgatga

SEQ ID NO: 1738 - RNA, 41 nt, synthetic construct
  source 1..41: mol_type = other RNA
gggtcgtaagcagttggtggtgcaggaggcattgctgatga

SEQ ID NO: 1739 - RNA, 41 nt, synthetic construct
  source 1..41: mol_type = other RNA
ggatgctaagcaattggtggtgcaggaggcattgctgatga

SEQ ID NO: 1740 - RNA, 42 nt, synthetic construct
  source 1..42: mol_type = other RNA
gactgccaagcagttggtaggtgcaggaggcattgctgatga

SEQ ID NO: 1741 - RNA, 41 nt, synthetic construct
  source 1..41: mol_type = other RNA
gggagccaagcagttggtagtgcaggaggcattgctgatga

SEQ ID NO: 1742 - RNA, 40 nt, synthetic construct
  source 1..40: mol_type = other RNA
gggtgccaacagttggtgacgcaggaggcattgctgatga

SEQ ID NO: 1743 - RNA, 44 nt, synthetic construct
  source 1..44: mol_type = other RNA
ggtgctaagcagttgggaaaaggtgcaggaggcattgctgatga

SEQ ID NO: 1744 - RNA, 40 nt, synthetic construct
  source 1..40: mol_type = other RNA
gggtgccaagcggtcggtgggcaggaggcattgctgatga

SEQ ID NO: 1745 - RNA, 41 nt, synthetic construct
  source 1..41: mol_type = other RNA
atgaccttggtcaggggtgtcaagcagctggtggtgcagga

SEQ ID NO: 1746 - RNA, 41 nt, synthetic construct
  source 1..41: mol_type = other RNA
gggtgtcaagcaaatcgtggtgcaggaggcattgctgatga

SEQ ID NO: 1747 - RNA, 41 nt, synthetic construct
  source 1..41: mol_type = other RNA
gggtgttaagcagtcggcggtgcaggaggcattgctgatga

SEQ ID NO: 1748 - RNA, 41 nt, synthetic construct
  source 1..41: mol_type = other RNA
gggtgtcaagcagtccgtggtgcaggaggcattgctgatga

SEQ ID NO: 1749 - RNA, 43 nt, synthetic construct
  source 1..43: mol_type = other RNA
taaagtgccgagcagttgatggtgcaggaggcattgctgatga

SEQ ID NO: 1750 - RNA, 43 nt, synthetic construct; identical to SEQ ID NO: 1749
  source 1..43: mol_type = other RNA

SEQ ID NO: 1751 - RNA, 38 nt, synthetic construct
  source 1..38: mol_type = other RNA
gggtgttaagcagtgggtgcaggaggcattgctgatga

SEQ ID NO: 1752 - RNA, 41 nt, synthetic construct
  source 1..41: mol_type = other RNA
caaagttgtcatggatgaccttggcctggggctgcctgcag

SEQ ID NO: 1753 - RNA, 43 nt, synthetic construct
  source 1..43: mol_type = other RNA
gggtgttaagcagttgtaggggtgcaggaggcattgctgatga

SEQ ID NO: 1754 - RNA, 41 nt, synthetic construct
  source 1..41: mol_type = other RNA
gggtgttaagcaaatcgtggtgcaggaggcattgctgatga

SEQ ID NO: 1755 - RNA, 41 nt, synthetic construct
  source 1..41: mol_type = other RNA
gggtgttaagcagtgggtggtgcaggaggcattgctgatga

SEQ ID NO: 1756 - RNA, 41 nt, synthetic construct
  source 1..41: mol_type = other RNA
atgaccttggccaggggtgccacgcagttggtggtgcagga

SEQ ID NO: 1757 - RNA, 41 nt, synthetic construct
  source 1..41: mol_type = other RNA
caaagttgtcatggatgaccatgtccaggtctgctaaacag

SEQ ID NO: 1758 - RNA, 41 nt, synthetic construct
  source 1..41: mol_type = other RNA
gggtgttaagcagctagtggtgcaggaggcattgctgatga

SEQ ID NO: 1759 - RNA, 39 nt, synthetic construct
  source 1..39: mol_type = other RNA
atgaccttggccaggggtgccaagcagtgtggtgcagga

SEQ ID NO: 1760 - RNA, 41 nt, synthetic construct
  source 1..41: mol_type = other RNA
gggtgccaagaagttagtaaagcaggaggcattgctgatga

SEQ ID NO: 1761 - RNA, 41 nt, synthetic construct
  source 1..41: mol_type = other RNA
gggtgccaagtgttggatggtgcaggaggcattgctgatga

SEQ ID NO: 1762 - RNA, 40 nt, synthetic construct
  source 1..40: mol_type = other RNA
gggtgccaacagttggtgtcgcaggaggcattgctgatga

SEQ ID NO: 1763 - RNA, 41 nt, synthetic construct
  source 1..41: mol_type = other RNA
atgaccttggccaagggtgccaggtagttggtggtgcagga

SEQ ID NO: 1764 - RNA, 41 nt, synthetic construct
  source 1..41: mol_type = other RNA
gagtgccaagctgttggacctgcaggaggcattgctgatga

SEQ ID NO: 1765 - RNA, 40 nt, synthetic construct
  source 1..40: mol_type = other RNA
gggtgttaagcagtttaggtgcaggaggcattgctgatga

SEQ ID NO: 1766 - RNA, 40 nt, synthetic construct
  source 1..40: mol_type = other RNA
gggtccgagcagttgatggtgcaggaggcattgctgatga

SEQ ID NO: 1767 - RNA, 41 nt, synthetic construct
  source 1..41: mol_type = other RNA
gggtggcaagcgcttggtggggcaggaggcattgctgatga

SEQ ID NO: 1768 - RNA, 41 nt, synthetic construct
  source 1..41: mol_type = other RNA
atgaccttggcatgggggtgcaagcagttggtggtgcagga

SEQ ID NO: 1769 - RNA, 40 nt, synthetic construct
  source 1..40: mol_type = other RNA
caaagttgtcatggatgaccttgccccacggtgaatgcct

SEQ ID NO: 1770 - RNA, 41 nt, synthetic construct
  source 1..41: mol_type = other RNA
atgaccttggccaggagtgctaagcagcgcgtggtgcagga

SEQ ID NO: 1771 - RNA, 43 nt, synthetic construct
  source 1..43: mol_type = other RNA
cagggttgccagtgggtggaggtgcaggaggcattgctgatga

SEQ ID NO: 1772 - RNA, 42 nt, synthetic construct
  source 1..42: mol_type = other RNA
gagtgccaagtaacatggtggagcaggaggcattgctgatga

SEQ ID NO: 1773 - RNA, 38 nt, synthetic construct
  source 1..38: mol_type = other RNA
ggcttgccaagccttggtgcaggaggcattgctgatga

SEQ ID NO: 1774 - RNA, 41 nt, synthetic construct
  source 1..41: mol_type = other RNA
gggtctcgagcagttagtggtgcaggaggcattgctgatga

SEQ ID NO: 1775 - RNA, 41 nt, synthetic construct
  source 1..41: mol_type = other RNA
caaagttgtcatggatgaccttgacatgggggtgcaagcag

SEQ ID NO: 1776 - RNA, 41 nt, synthetic construct
  source 1..41: mol_type = other RNA
atgaccttggccagcggttgctagcggttggtggtgcagga

SEQ ID NO: 1777 - RNA, 41 nt, synthetic construct
  source 1..41: mol_type = other RNA
caaagttgtcatggatgaccttagccaggtgtgccgacttg

SEQ ID NO: 1778 - RNA, 41 nt, synthetic construct
  source 1..41: mol_type = other RNA
gggtgttaagcagtccgtggtgcaggaggcattgctgatga

SEQ ID NO: 1779 - RNA, 47 nt, synthetic construct
  source 1..47: mol_type = other RNA
caaagttgtcatggatgaccttggcgaggttcaggcgtgctgagcag

SEQ ID NO: 1780 - RNA, 43 nt, synthetic construct
  source 1..43: mol_type = other RNA
cagggttgctagtgggtggaggtgcaggaggcattgctgatga

SEQ ID NO: 1781 - RNA, 50 nt, synthetic construct
  source 1..50: mol_type = other RNA
ggggctacagtgcaacatgatcgcagtggtgcaggaggcattgctgatga

SEQ ID NO: 1782 - RNA, 42 nt, synthetic construct
  source 1..42: mol_type = other RNA
caaagttgtcatggatgacctatggccaggggtgcccagcag

SEQ ID NO: 1783 - RNA, 41 nt, synthetic construct
  source 1..41: mol_type = other RNA
gagtgctaagcagcgcgtggtgcaggaggcattgctgatga

SEQ ID NO: 1784 - RNA, 41 nt, synthetic construct
  source 1..41: mol_type = other RNA
atgaccttggctaggagtgctaaccagttggtggtgcagga

SEQ ID NO: 1785 - RNA, 41 nt, synthetic construct
  source 1..41: mol_type = other RNA
gggtgacaagcggctggtggtgcaggaggcattgctgatga

SEQ ID NO: 1786 - RNA, 40 nt, synthetic construct
  source 1..40: mol_type = other RNA
agtgccaagcagtaggtggtgcaggaggcattgctgatga

SEQ ID NO: 1787 - RNA, 41 nt, synthetic construct
  source 1..41: mol_type = other RNA
gggtgctaaacaactggtggtgcaggaggcattgctgatga

SEQ ID NO: 1788 - RNA, 41 nt, synthetic construct
  source 1..41: mol_type = other RNA
gtgtgctgacttgtcggtggtgcaggaggcattgctgatga

SEQ ID NO: 1789 - RNA, 41 nt, synthetic construct
  source 1..41: mol_type = other RNA
atgaccttggccagggttgccgagcagttggtggtgcagga

SEQ ID NO: 1790 - RNA, 41 nt, synthetic construct
  source 1..41: mol_type = other RNA
gagagccatgcacttagtggtgcaggaggcattgctgatga

SEQ ID NO: 1791 - RNA, 40 nt, synthetic construct
  source 1..40: mol_type = other RNA
gggtgccaagcagttggtgtgcaggaggcattgctgatga

SEQ ID NO: 1792 - RNA, 39 nt, synthetic construct
  source 1..39: mol_type = other RNA
gggtgccaaggttggtggtgcaggaggcattgctgatga

SEQ ID NO: 1793 - RNA, 41 nt, synthetic construct
  source 1..41: mol_type = other RNA
gggtgctaagcggtaagtggtgcaggaggcattgctgatga

SEQ ID NO: 1794 - RNA, 41 nt, synthetic construct
  source 1..41: mol_type = other RNA
caaagttgtcatggatgaccttgcccaggggtaccgagcag

SEQ ID NO: 1795 - RNA, 52 nt, synthetic construct
  source 1..52: mol_type = other RNA
gggtgctaaacagttgcccaaaaataccaggtgcaggaggcattgctgatga

SEQ ID NO: 1796 - RNA, 41 nt, synthetic construct
  source 1..41: mol_type = other RNA
gggtgtcaagcagttggtactgcaggaggcattgctgatga

SEQ ID NO: 1797 - RNA, 41 nt, synthetic construct
  source 1..41: mol_type = other RNA
gggtgttaagcaattcgtggtgcaggaggcattgctgatga

SEQ ID NO: 1798 - RNA, 41 nt, synthetic construct
  source 1..41: mol_type = other RNA
gggtgttaagcccagttaggtgcaggaggcattgctgatga

SEQ ID NO: 1799 - RNA, 41 nt, synthetic construct
  source 1..41: mol_type = other RNA
gggtgtcaagcccagttaggtgcaggaggcattgctgatga

SEQ ID NO: 1800 - RNA, 41 nt, synthetic construct
  source 1..41: mol_type = other RNA
caaagttgtcatggatgaccttgtaaaagggtctcgagcag

SEQ ID NO: 1801 - RNA, 43 nt, synthetic construct
  source 1..43: mol_type = other RNA
atgaccttggccagcagggttgccagtgggtggtggtgcagga

SEQ ID NO: 1802 - RNA, 42 nt, synthetic construct
  source 1..42: mol_type = other RNA
caaagttgtcatggatgaccttagccaggtgtgccgaagtca

SEQ ID NO: 1803 - RNA, 41 nt, synthetic construct
  source 1..41: mol_type = other RNA
gggtgctaagcagtccccggtgcaggaggcattgctgatga

SEQ ID NO: 1804 - RNA, 40 nt, synthetic construct
  source 1..40: mol_type = other RNA
caaagttgtcatggatgaccttggaggggctacagtgcaa

SEQ ID NO: 1805 - RNA, 56 nt, synthetic construct
  source 1..56: mol_type = other RNA
atgaccttggccaggggtgctgagcggtcatgttgcctgagctcagtggtgcagga

SEQ ID NO: 1806 - RNA, 48 nt, synthetic construct
  source 1..48: mol_type = other RNA
caaagttgtcatggatgacctccaagtccccactaaagtgccgagcag

SEQ ID NO: 1807 - RNA, 48 nt, synthetic construct; identical to SEQ ID NO: 1806
  source 1..48: mol_type = other RNA

SEQ ID NO: 1808 - RNA, 40 nt, synthetic construct
  source 1..40: mol_type = other RNA
caaagttgtcatggatgaccttgccccacggtgactgcct

SEQ ID NO: 1809 - RNA, 41 nt, synthetic construct
  source 1..41: mol_type = other RNA
gtgtaccaagcggtcagtggtgcaggaggcattgctgatga

SEQ ID NO: 1810 - RNA, 40 nt, synthetic construct
  source 1..40: mol_type = other RNA
atgaccttggccaggggtgccaaagcggtttggtgcagga

SEQ ID NO: 1811 - RNA, 41 nt, synthetic construct
  source 1..41: mol_type = other RNA
gggtgttaagcagtggttggtgcaggaggcattgctgatga

SEQ ID NO: 1812 - RNA, 42 nt, synthetic construct
  source 1..42: mol_type = other RNA
gggatgccacgcaggtggtggcgcaggaggcattgctgatga

SEQ ID NO: 1813 - RNA, 45 nt, synthetic construct
  source 1..45: mol_type = other RNA
gggtgtcaatcagttggtgtggagagcaggaggcattgctgatga

SEQ ID NO: 1814 - RNA, 40 nt, synthetic construct
  source 1..40: mol_type = other RNA
atgaccttggccaggggtgcccagcagttgtggtgcagga

SEQ ID NO: 1815 - RNA, 47 nt, synthetic construct
  source 1..47: mol_type = other RNA
caaagttgtcatggatgaccttggcgaggttcaggcgtgccgagcag

SEQ ID NO: 1816 - RNA, 41 nt, synthetic construct
  source 1..41: mol_type = other RNA
gggtgctaagcagttgctaatgcaggaggcattgctgatga

SEQ ID NO: 1817 - RNA, 41 nt, synthetic construct
  source 1..41: mol_type = other RNA
gcgtgctgagcaggtggttgtgcaggaggcattgctgatga

SEQ ID NO: 1818 - RNA, 41 nt, synthetic construct
  source 1..41: mol_type = other RNA
cggtaccaagcggtaggtggggcaggaggcattgctgatga

SEQ ID NO: 1819 - RNA, 42 nt, synthetic construct
  source 1..42: mol_type = other RNA
caaagttgtcatggatgaccttagccaggtgtgctgaagtca

SEQ ID NO: 1820 - RNA, 48 nt, synthetic construct
  source 1..48: mol_type = other RNA
tcggtgaatgcctgtgtgactgccttgtgcaggaggcattgctgatga

SEQ ID NO: 1821 - RNA, 39 nt, synthetic construct
  source 1..39: mol_type = other RNA
atgaccttggccaagggtgctaaggttggtggtgcagga

SEQ ID NO: 1822 - RNA, 58 nt, synthetic construct
  source 1..58: mol_type = other RNA
gaaccccgctgccagcggttgaaaaggctgggcgtggtgcaggaggcattgctgatga

SEQ ID NO: 1823 - RNA, 50 nt, synthetic construct
  source 1..50: mol_type = other RNA
ggggccacagtgcaacatgatcgcagtggtgcaggaggcattgctgatga

SEQ ID NO: 1824 - RNA, 40 nt, synthetic construct
  source 1..40: mol_type = other RNA
caaagttgtcatggatgaccttggaggggccacagtgcaa

SEQ ID NO: 1825 - RNA, 41 nt, synthetic construct
  source 1..41: mol_type = other RNA
atgaccttggccaggggtaccgagcagttgctggtgcagga

SEQ ID NO: 1826 - RNA, 41 nt, synthetic construct
  source 1..41: mol_type = other RNA
caaagttgtcatggatgaccttagccaggtgtgctgacttg

SEQ ID NO: 1827 - RNA, 44 nt, synthetic construct
  source 1..44: mol_type = other RNA
ggtctgctaaacagttctacaggtgcaggaggcattgctgatga

SEQ ID NO: 1828 - RNA, 58 nt, synthetic construct
  source 1..58: mol_type = other RNA
gaaccccgctgctagcggttgaaaaggctgggcgtggtgcaggaggcattgctgatga

SEQ ID NO: 1829 - RNA, 41 nt, synthetic construct
  source 1..41: mol_type = other RNA
gctgcccaagaagtcagtggagcaggaggcattgctgatga

SEQ ID NO: 1830 - RNA, 41 nt, synthetic construct
  source 1..41: mol_type = other RNA
gggtgcccagcagttgtgagtgcaggaggcattgctgatga

SEQ ID NO: 1831 - RNA, 41 nt, synthetic construct
  source 1..41: mol_type = other RNA
ggggtgcaagcagacaaggttgcaggaggcattgctgatga

SEQ ID NO: 1832 - RNA, 42 nt, synthetic construct
  source 1..42: mol_type = other RNA
gggtgttaagtgcatagttggggcaggaggcattgctgatga

SEQ ID NO: 1833 - RNA, 41 nt, synthetic construct
  source 1..41: mol_type = other RNA
atgaccttgggcaagggtgacaagcggctggtggtgcagga

SEQ ID NO: 1834 - RNA, 41 nt, synthetic construct
  source 1..41: mol_type = other RNA
atgaccttggccaggtgtgctgaagtcattatggtgcagga

SEQ ID NO: 1835 - RNA, 41 nt, synthetic construct
  source 1..41: mol_type = other RNA
gggtggcgagctagcagtggtgcaggaggcattgctgatga

SEQ ID NO: 1836 - RNA, 40 nt, synthetic construct
  source 1..40: mol_type = other RNA
atgaccttggccaggggtccgagcagttgatggtgcagga

SEQ ID NO: 1837 - RNA, 39 nt, synthetic construct
  source 1..39: mol_type = other RNA
gggtgccaaagcggttggtgcaggaggcattgctgatga

SEQ ID NO: 1838 - RNA, 41 nt, synthetic construct
  source 1..41: mol_type = other RNA
gtgtgctgaagtcattatggtgcaggaggcattgctgatga

SEQ ID NO: 1839 - RNA, 41 nt, synthetic construct
  source 1..41: mol_type = other RNA
atgaccttggaaaggggtcgcaagcagttggtggtgcagga

SEQ ID NO: 1840 - RNA, 48 nt, synthetic construct
  source 1..48: mol_type = other RNA
caaagttgtcatggatgacctccaagtccccactaaagtgctgagcag

SEQ ID NO: 1841 - RNA, 48 nt, synthetic construct; identical to SEQ ID NO: 1840
  source 1..48: mol_type = other RNA

SEQ ID NO: 1842 - RNA, 43 nt, synthetic construct
  source 1..43: mol_type = other RNA
atgaccttggccagcagggttgctagtgggtggtggtgcagga

SEQ ID NO: 1843 - RNA, 48 nt, synthetic construct
  source 1..48: mol_type = other RNA
acggtgactgcctgtgtgactgccttgtgcaggaggcattgctgatga

SEQ ID NO: 1844 - RNA, 47 nt, synthetic construct
  source 1..47: mol_type = other RNA
atgaccttggcgaggttcaggcgtgccgagcaggtggtggtgcagga

SEQ ID NO: 1845 - RNA, 41 nt, synthetic construct
  source 1..41: mol_type = other RNA
atgaccttgggcatgggtgacaagcggctggtggtgcagga

SEQ ID NO: 1846 - RNA, 40 nt, synthetic construct
  source 1..40: mol_type = other RNA
gggcctgtcaagcaagtaaggcaggaggcattgctgatga

SEQ ID NO: 1847 - RNA, 41 nt, synthetic construct
  source 1..41: mol_type = other RNA
gtgtgccgaagtcattatggtgcaggaggcattgctgatga

SEQ ID NO: 1848 - RNA, 40 nt, synthetic construct
  source 1..40: mol_type = other RNA
atgaccttggccaggggcctgtgaagcaagtggtgcagga

SEQ ID NO: 1849 - RNA, 41 nt, synthetic construct
  source 1..41: mol_type = other RNA
atgaccttggccaggtgtgccgaagtcattatggtgcagga

SEQ ID NO: 1850 - RNA, 56 nt, synthetic construct
  source 1..56: mol_type = other RNA
atgaccttggccaggggtgccgagcggtcatgttgcctgagctcagtggtgcagga

SEQ ID NO: 1851 - RNA, 41 nt, synthetic construct
  source 1..41: mol_type = other RNA
atgaccttggccaggtgtgctgacttgtcggtggtgcagga

SEQ ID NO: 1852 - RNA, 41 nt, synthetic construct
  source 1..41: mol_type = other RNA
atgaccttggccaggggtgccgagcaattggtggtgcagga

SEQ ID NO: 1853 - RNA, 41 nt, synthetic construct
  source 1..41: mol_type = other RNA
atgaccttggccatgggtggcgagctagcagtggtgcagga

SEQ ID NO: 1854 - RNA, 40 nt, synthetic construct
  source 1..40: mol_type = other RNA
gggcctgtgaagcaagtaaggcaggaggcattgctgatga

SEQ ID NO: 1855 - RNA, 41 nt, synthetic construct
  source 1..41: mol_type = other RNA
atgaccttggtgaggggcagcaagcagctggtggtgcagga

SEQ ID NO: 1856 - RNA, 43 nt, synthetic construct
  source 1..43: mol_type = other RNA
atgaccttggttagggggtgcaagcagacaaggtggtgcagga

SEQ ID NO: 1857 - RNA, 41 nt, synthetic construct
  source 1..41: mol_type = other RNA
atgaccttggaaaagggtctcgagcagttagtggtgcagga

SEQ ID NO: 1858 - RNA, 43 nt, synthetic construct
  source 1..43: mol_type = other RNA
atgaccttggtcactaaagtgccgagcagttgatggtgcagga

SEQ ID NO: 1859 - RNA, 43 nt, synthetic construct; identical to SEQ ID NO: 1858
  source 1..43: mol_type = other RNA

SEQ ID NO: 1860 - RNA, 47 nt, synthetic construct
  source 1..47: mol_type = other RNA
atgaccttggcgaggttcaggcgtgctgagcaggtggtggtgcagga

SEQ ID NO: 1861 - RNA, 47 nt, synthetic construct
  source 1..47: mol_type = other RNA
atgaccttggaggggctacagtgcaacatgatcgcagtggtgcagga

SEQ ID NO: 1862 - RNA, 41 nt, synthetic construct
  source 1..41: mol_type = other RNA
atgaccttggcccctcggtgactgcctgtgttggtgcagga

SEQ ID NO: 1863 - RNA, 43 nt, synthetic construct
  source 1..43: mol_type = other RNA
atgaccttggtcactaaagtgctgagcagttgatggtgcagga

SEQ ID NO: 1864 - RNA, 43 nt, synthetic construct; identical to SEQ ID NO: 1863
  source 1..43: mol_type = other RNA

SEQ ID NO: 1865 - RNA, 58 nt, synthetic construct
  source 1..58: mol_type = other RNA
atgaccttggttaggaaccccgctgctagcggttgaaaaggctgggcgtggtgcagga

SEQ ID NO: 1866 - RNA, 41 nt, synthetic construct
  source 1..41: mol_type = other RNA
atgaccttggcccctcggtgaatgcctgtgttggtgcagga

SEQ ID NO: 1867 - RNA, 41 nt, synthetic construct
  source 1..41: mol_type = other RNA
atgaccttggccaggtgtgccgacttgtcggtggtgcagga

SEQ ID NO: 1868 - RNA, 56 nt, synthetic construct
  source 1..56: mol_type = other RNA
gggtgccgagcaattggtggtacttgagcctaggatgcaggaggcattgctgatga

SEQ ID NO: 1869 - RNA, 47 nt, synthetic construct
  source 1..47: mol_type = other RNA
atgaccttggaggggccacagtgcaacatgatcgcagtggtgcagga

SEQ ID NO: 1870 - RNA, 58 nt, synthetic construct
  source 1..58: mol_type = other RNA
atgaccttggttaggaaccccgctgccagcggttgaaaaggctgggcgtggtgcagga

SEQ ID NO: 1871 - RNA, 56 nt, synthetic construct
  source 1..56: mol_type = other RNA
gggtgctgagcaattggtggtacttgagcctaggatgcaggaggcattgctgatga

SEQ ID NO: 1872 - RNA, 41 nt, synthetic construct
  source 1..41: mol_type = other RNA
aggtggacctttggatgtccaagctccattaaaggagggag

SEQ ID NO: 1873 - RNA, 41 nt, synthetic construct
  source 1..41: mol_type = other RNA
aacatagtgttcaggtgggcgtttggatgtccaagcaccac

SEQ ID NO: 1874 - RNA, 41 nt, synthetic construct
  source 1..41: mol_type = other RNA
aacatagtgttcaggtggattgtttggtgtccaagcaccac

SEQ ID NO: 1875 - RNA, 41 nt, synthetic construct
  source 1..41: mol_type = other RNA
aacatagtgttcaggtgggatattgggtgtccaagcaccac

SEQ ID NO: 1876 - RNA, 41 nt, synthetic construct
  source 1..41: mol_type = other RNA
gtgttcaggtggacctttggatgtccaagctccacttttgg

SEQ ID NO: 1877 - RNA, 41 nt, synthetic construct
  source 1..41: mol_type = other RNA
aacatagtgttcaggtggacttttgagtgtccaagcaccac

SEQ ID NO: 1878 - RNA, 41 nt, synthetic construct
  source 1..41: mol_type = other RNA
aacatagtgttcaggtgggatattgggtgttcaagcaccac

SEQ ID NO: 1879 - RNA, 41 nt, synthetic construct
  source 1..41: mol_type = other RNA
aacatagtgttcagctggacttttttgtgtccaagcaccac

SEQ ID NO: 1880 - RNA, 41 nt, synthetic construct
  source 1..41: mol_type = other RNA
aacatagtgttcaggtggaactttgggtgttcaagcaccac

SEQ ID NO: 1881 - RNA, 41 nt, synthetic construct
  source 1..41: mol_type = other RNA
aacatagtgttcaggtggaatattaggtgttcaagcaccac

SEQ ID NO: 1882 - RNA, 41 nt, synthetic construct
  source 1..41: mol_type = other RNA
aacatagtgttcagctgaactttttggtgtccaagcaccac

SEQ ID NO: 1883 - RNA, 41 nt, synthetic construct
  source 1..41: mol_type = other RNA
aggtggacttttggatatccaagcacaactcttggagggag

SEQ ID NO: 1884 - RNA, 41 nt, synthetic construct
  source 1..41: mol_type = other RNA
aacatagtattcaggtggacttttgcgtgtccaagcaccac

SEQ ID NO: 1885 - RNA, 42 nt, synthetic construct
  source 1..42: mol_type = other RNA
aacatagtgttcagctggactttttggatgtccaagcaccac

SEQ ID NO: 1886 - RNA, 41 nt, synthetic construct
  source 1..41: mol_type = other RNA
aacatagtgttcaggtagatttttgggtgtccaagcaccac

SEQ ID NO: 1887 - RNA, 31 nt, synthetic construct
  source 1..31: mol_type = other RNA
ggtgtccaagctccattaaaggacggagatt

SEQ ID NO: 1888 - RNA, 31 nt, synthetic construct
  source 1..31: mol_type = other RNA
tgttcaggtggacctttggatgtccaagcac

SEQ ID NO: 1889 - RNA, 41 nt, synthetic construct
  source 1..41: mol_type = other RNA
aacatagtgttcaggtggacttgtgggtgtccaagcaccac

SEQ ID NO: 1890 - RNA, 41 nt, synthetic construct
  source 1..41: mol_type = other RNA
aacatagtgttcaggtgcgcgtttgggcgtccaagcaccac

SEQ ID NO: 1891 - RNA, 40 nt, synthetic construct
  source 1..40: mol_type = other RNA
aacatagtgttcaggtaggctttgggtgtccaagcaccac

SEQ ID NO: 1892 - RNA, 41 nt, synthetic construct
  source 1..41: mol_type = other RNA
aacatagtgttttggtgggtgtttgggtatccaagcaccac

SEQ ID NO: 1893 - RNA, 41 nt, synthetic construct
  source 1..41: mol_type = other RNA
aacatagtgttcaggtggacttttgggtgttcaagcaccac

SEQ ID NO: 1894 - RNA, 41 nt, synthetic construct
  source 1..41: mol_type = other RNA
aacatagtgttcagttgaacttttaggtgtccaagcaccac

SEQ ID NO: 1895 - RNA, 41 nt, synthetic construct
  source 1..41: mol_type = other RNA
gtgttcaggtggacttttggatgtccaagcacaacttttgg

SEQ ID NO: 1896 - RNA, 41 nt, synthetic construct
  source 1..41: mol_type = other RNA
aacatagtgttcaggtgggctttggggtgttcaagcaccac

SEQ ID NO: 1897 - RNA, 41 nt, synthetic construct
  source 1..41: mol_type = other RNA
aacatagtgttcacctggacttttaggtatccaagcaccac

SEQ ID NO: 1898 - RNA, 41 nt, synthetic construct
  source 1..41: mol_type = other RNA
aacatagtgttcaggtgggcttttgggtgttcaagcaccac

SEQ ID NO: 1899 - RNA, 41 nt, synthetic construct
  source 1..41: mol_type = other RNA
aacatagtgttccggtggacttttgggtgtccaagcaccac

SEQ ID NO: 1900 - RNA, 41 nt, synthetic construct
  source 1..41: mol_type = other RNA
gtgttcaggtggattgttggctgtccaagcaccacttttgg

SEQ ID NO: 1901 - RNA, 41 nt, synthetic construct
  source 1..41: mol_type = other RNA
gtgttcaggtggattgtttggtgtccaagtatcacttttgg

SEQ ID NO: 1902 - RNA, 41 nt, synthetic construct
  source 1..41: mol_type = other RNA
aacatagtgttttggtggactttcgggtgtccaagcaccac

SEQ ID NO: 1903 - RNA, 41 nt, synthetic construct
  source 1..41: mol_type = other RNA
aacatagtgttcagctggactttttggtgtccaagcaccac

SEQ ID NO: 1904 - RNA, 41 nt, synthetic construct
  source 1..41: mol_type = other RNA
aacatagtattcaggtggacttttgggtgtccaagcaccac

SEQ ID NO: 1905 - RNA, 41 nt, synthetic construct
  source 1..41: mol_type = other RNA
aacatagtgtccagctggactttgaggtgtccaagcaccac

SEQ ID NO: 1906 - RNA, 41 nt, synthetic construct
  source 1..41: mol_type = other RNA
aacatagtgttcaggtggacctttgggtgtccaagcaccac

SEQ ID NO: 1907 - RNA, 41 nt, synthetic construct
  source 1..41: mol_type = other RNA
aacatagtgttcagctcgactttttggtgtccaagcaccac

SEQ ID NO: 1908 - RNA, 42 nt, synthetic construct
  source 1..42: mol_type = other RNA
aacatagtgttcaggtggacttctgtggtgtccaagcaccac

SEQ ID NO: 1909 - RNA, 41 nt, synthetic construct
  source 1..41: mol_type = other RNA
gtgttcaggtggacatttggatgtccaagcaccacttttgg

SEQ ID NO: 1910 - RNA, 41 nt, synthetic construct
  source 1..41: mol_type = other RNA
aacatagtgttcgggtggactcttgggtgtccaagcaccac

SEQ ID NO: 1911 - RNA, 31 nt, synthetic construct
  source 1..31: mol_type = other RNA
tgttcaggtggacttttgagtgtccaagcac

SEQ ID NO: 1912 - RNA, 31 nt, synthetic construct
  source 1..31: mol_type = other RNA
tgttcaggtggacttatgggtatccaagcac

SEQ ID NO: 1913 - RNA, 41 nt, synthetic construct
  source 1..41: mol_type = other RNA
aacatagtgttcagctggaattttcggtgtccaagcaccac

SEQ ID NO: 1914 - RNA, 44 nt, synthetic construct
  source 1..44: mol_type = other RNA
aggtggacctttgggtgtccaagcgacccaccttttggagggag

SEQ ID NO: 1915 - RNA, 41 nt, synthetic construct
  source 1..41: mol_type = other RNA
gtgttcaggtgggcgtttggatgtccaagcaccacttttgg

SEQ ID NO: 1916 - RNA, 41 nt, synthetic construct
  source 1..41: mol_type = other RNA
aacatagtgtttaggtggcattttgggtgtccaagcaccac

SEQ ID NO: 1917 - RNA, 31 nt, synthetic construct
  source 1..31: mol_type = other RNA
tgttcaggtggatgtttgggtgtccaagcac

SEQ ID NO: 1918 - RNA, 41 nt, synthetic construct
  source 1..41: mol_type = other RNA
gtgttcaggtggacttctgtggtgtccaagcatacttttgg

SEQ ID NO: 1919 - RNA, 41 nt, synthetic construct
  source 1..41: mol_type = other RNA
aacatagtgttcagctggaattttaggtgtccaagcaccac

SEQ ID NO: 1920 - RNA, 41 nt, synthetic construct
  source 1..41: mol_type = other RNA
gtgttcaggtggactcttgggtgtccaagcacgacttttgg

SEQ ID NO: 1921 - RNA, 41 nt, synthetic construct
  source 1..41: mol_type = other RNA
aacatagtgttaaggtggcctttagggtgtccaagcaccac

SEQ ID NO: 1922 - RNA, 41 nt, synthetic construct
  source 1..41: mol_type = other RNA
gtgttcaggtggatgtttgggtgtccaaacaccacttttgg

SEQ ID NO: 1923 - RNA, 41 nt, synthetic construct
  source 1..41: mol_type = other RNA
gtgttcagctggactttttggtatccaagctccacttttgg

SEQ ID NO: 1924 - RNA, 41 nt, synthetic construct
  source 1..41: mol_type = other RNA
aacatagtgttcaggtggacatttggatgtccaagcaccac

SEQ ID NO: 1925 - RNA, 41 nt, synthetic construct
  source 1..41: mol_type = other RNA
aggtggactattgggtgttcaagcacaacacttggagggag

SEQ ID NO: 1926 - RNA, 31 nt, synthetic construct
  source 1..31: mol_type = other RNA
tgttcaggtggacatttggatgtccaagcac

SEQ ID NO: 1927 - RNA, 43 nt, synthetic construct
  source 1..43: mol_type = other RNA
aacatagtgttcaggtggacttctaggttcgtccaagcaccac

SEQ ID NO: 1928 - RNA, 33 nt, synthetic construct
  source 1..33: mol_type = other RNA
ggacttttgcaggtgttccagtgcaacttttgg

SEQ ID NO: 1929 - RNA, 43 nt, synthetic construct
  source 1..43: mol_type = other RNA
aggtggacttttcggtgtccaagcagatcacttggggagggag

SEQ ID NO: 1930 - RNA, 41 nt, synthetic construct
  source 1..41: mol_type = other RNA
gtgttcaggtggcctttagggtgtccaagaaccacttttgg

SEQ ID NO: 1931 - RNA, 31 nt, synthetic construct
  source 1..31: mol_type = other RNA
tgttcaggtggattgttggctgtccaagcac

SEQ ID NO: 1932 - RNA, 41 nt, synthetic construct
  source 1..41: mol_type = other RNA
aacatagtgttcaggtgcacttttgggtgtccaagcaccac

SEQ ID NO: 1933 - RNA, 41 nt, synthetic construct
  source 1..41: mol_type = other RNA
aacatagtgttaagctggacttttaggtgcccaagcaccac

SEQ ID NO: 1934 - RNA, 42 nt, synthetic construct
  source 1..42: mol_type = other RNA
aggtggacttttaggatgtccaaggaccacttttggagggag

SEQ ID NO: 1935 - RNA, 41 nt, synthetic construct
  source 1..41: mol_type = other RNA
acttttgggtgcccaaggacctcttttggaacgagatttcg

SEQ ID NO: 1936 - RNA, 31 nt, synthetic construct
  source 1..31: mol_type = other RNA
tgttcaggtggacttttaggtgtccaagcac

SEQ ID NO: 1937 - RNA, 41 nt, synthetic construct
  source 1..41: mol_type = other RNA
gtgttcaggcggacttttgggaatccaagcaccacttttgg

SEQ ID NO: 1938 - RNA, 41 nt, synthetic construct
  source 1..41: mol_type = other RNA
aggtggactttttggtatccaagctccacttttggagggag

SEQ ID NO: 1939 - RNA, 41 nt, synthetic construct
  source 1..41: mol_type = other RNA
gtgttcaggtggacgtttgggtgtccaagcaccacttttgg

SEQ ID NO: 1940 - RNA, 41 nt, synthetic construct
  source 1..41: mol_type = other RNA
aggtggacgtttgggtatccaagcaccgtttttggagggag

SEQ ID NO: 1941 - RNA, 41 nt, synthetic construct
  source 1..41: mol_type = other RNA
aacatagtgttcagctgaaattttcggtgtccaagcaccac

SEQ ID NO: 1942 - RNA, 41 nt, synthetic construct
  source 1..41: mol_type = other RNA
gtgttcaggtgcgcgtttgggcgtccaaacaccacttttgg

SEQ ID NO: 1943 - RNA, 39 nt, synthetic construct
  source 1..39: mol_type = other RNA
aacatagtgcaggtggactttaggtagtccaagcaccac

SEQ ID NO: 1944 - RNA, 41 nt, synthetic construct
  source 1..41: mol_type = other RNA
gtgttcaggtggactcatgggcgtccaagcaccacttttgg

SEQ ID NO: 1945 - RNA, 41 nt, synthetic construct
  source 1..41: mol_type = other RNA
aacatagtgcccaggtgggcttttgggtgtccaagcaccac

SEQ ID NO: 1946 - RNA, 40 nt, synthetic construct
  source 1..40: mol_type = other RNA
aacatagtgttcaggggacttttggatatccaagcaccac

SEQ ID NO: 1947 - RNA, 41 nt, synthetic construct
  source 1..41: mol_type = other RNA
gtgttcaggtggacctttgggtgtccaagcgacacttttgg

SEQ ID NO: 1948 - RNA, 41 nt, synthetic construct
  source 1..41: mol_type = other RNA
gtgttcagctggactttttggtatccaaggaaaacttttgg

SEQ ID NO: 1949 - RNA, 42 nt, synthetic construct
  source 1..42: mol_type = other RNA
aacatagtgttccggtggtcttgttgggtggccaagcaccac

SEQ ID NO: 1950 - RNA, 37 nt, synthetic construct
  source 1..37: mol_type = other RNA
aacatagtgttcaggtggactgggttccaagcaccac

SEQ ID NO: 1951 - RNA, 39 nt, synthetic construct
  source 1..39: mol_type = other RNA
aacatagtgttggtggacttttgggcgtccaagcaccac

SEQ ID NO: 1952 - RNA, 41 nt, synthetic construct
  source 1..41: mol_type = other RNA
aggtggacttgttggtatccaagcaccgcttttggagggag

SEQ ID NO: 1953 - RNA, 41 nt, synthetic construct
  source 1..41: mol_type = other RNA
aacatagtgttaagggggccttttaggtgtccaagcaccac

SEQ ID NO: 1954 - RNA, 42 nt, synthetic construct
  source 1..42: mol_type = other RNA
gtgttcaggtggacctcagggtggtccaagcaccacttttgg

SEQ ID NO: 1955 - RNA, 43 nt, synthetic construct
  source 1..43: mol_type = other RNA
aacatagtgttcaggtggacttttgcgggtgtccaagcaccac

SEQ ID NO: 1956 - RNA, 31 nt, synthetic construct
  source 1..31: mol_type = other RNA
tgttcaggtgggcgtttggatgtccaagcac

SEQ ID NO: 1957 - RNA, 41 nt, synthetic construct
  source 1..41: mol_type = other RNA
gtgttcagctggacttttaggtgcccaaggaccacttttgg

SEQ ID NO: 1958 - RNA, 31 nt, synthetic construct
  source 1..31: mol_type = other RNA
tgttcaggtggacttttggatgtccaagcac

SEQ ID NO: 1959 - RNA, 41 nt, synthetic construct
  source 1..41: mol_type = other RNA
acttttgggtgtccaagccccaattttggagggagatttcg

SEQ ID NO: 1960 - RNA, 41 nt, synthetic construct
  source 1..41: mol_type = other RNA
gtgttcaggtgcacttttgggtgtccaagcattacttttgg

SEQ ID NO: 1961 - RNA, 40 nt, synthetic construct
  source 1..40: mol_type = other RNA
aacatagtgtcaggtggactcatgggcgtccaagcaccac

SEQ ID NO: 1962 - RNA, 41 nt, synthetic construct
  source 1..41: mol_type = other RNA
aggtggactttttggtgtccaaggaccacttttggagggag

SEQ ID NO: 1963 - RNA, 41 nt, synthetic construct
  source 1..41: mol_type = other RNA
gtgttcaggtggacctttgggtgtccaagcaacacttttgg

SEQ ID NO: 1964 - RNA, 31 nt, synthetic construct
  source 1..31: mol_type = other RNA
tgttcaggtgggatattgggtgtccaagcac

SEQ ID NO: 1965 - RNA, 31 nt, synthetic construct
  source 1..31: mol_type = other RNA
tgttcaggtggcctttcgggtgttcaagcac

SEQ ID NO: 1966 - RNA, 41 nt, synthetic construct
  source 1..41: mol_type = other RNA
aacatagtgttcaggtgggcttgtgggtgttcaagcaccac

SEQ ID NO: 1967 - RNA, 41 nt, synthetic construct
  source 1..41: mol_type = other RNA
aacatagtgttcaggtggcctttcgggtgttcaagcaccac

SEQ ID NO: 1968 - RNA, 41 nt, synthetic construct
  source 1..41: mol_type = other RNA
aacatagtgttcaggtggacttttaggtgtccaagcaccac

SEQ ID NO: 1969 - RNA, 41 nt, synthetic construct
  source 1..41: mol_type = other RNA
aacatagtgttcaggtggacttctgggtgtccaagcaccac

SEQ ID NO: 1970 - RNA, 42 nt, synthetic construct
  source 1..42: mol_type = other RNA
gtgttcagctggacttttaggatgtccaaggaccacttttgg

SEQ ID NO: 1971 - RNA, 41 nt, synthetic construct
  source 1..41: mol_type = other RNA
gtgttcaggtggacttttgagtgtccaaccaccacttttgg

SEQ ID NO: 1972 - RNA, 40 nt, synthetic construct
  source 1..40: mol_type = other RNA
aacatagtgttgaggtggtttttgggtgtccaagcaccac

SEQ ID NO: 1973 - RNA, 41 nt, synthetic construct
  source 1..41: mol_type = other RNA
aggtggactttttggtgtccaagtgccacttttggagggag

SEQ ID NO: 1974 - RNA, 41 nt, synthetic construct
  source 1..41: mol_type = other RNA
gtgttcaggtggacttttgggatgtccaagcccacttttgg

SEQ ID NO: 1975 - RNA, 41 nt, synthetic construct
  source 1..41: mol_type = other RNA
gtgttcaggtggacttctgggtgtccaagcactacttttgg

SEQ ID NO: 1976 - RNA, 41 nt, synthetic construct
  source 1..41: mol_type = other RNA
aggtggactttgaggtgtccaagcgtcacttttggagggag

SEQ ID NO: 1977 - RNA, 41 nt, synthetic construct
  source 1..41: mol_type = other RNA
gtgttcagttggccttgttggtatccaagcaccacttttgg

SEQ ID NO: 1978 - RNA, 41 nt, synthetic construct
  source 1..41: mol_type = other RNA
aacatagtcttcaggtggacttttaggtgtccaagcaccac

SEQ ID NO: 1979 - RNA, 42 nt, synthetic construct
  source 1..42: mol_type = other RNA
aggtggacttttgggtggtccaagcacgcaacttggagggag

SEQ ID NO: 1980 - RNA, 41 nt, synthetic construct
  source 1..41: mol_type = other RNA
aggtggacatttggatgtccaagcaccacttttggagggag

SEQ ID NO: 1981 - RNA, 41 nt, synthetic construct
  source 1..41: mol_type = other RNA
aggtggacttttaggtggccaagcgaccgttttggagggag

SEQ ID NO: 1982 - RNA, 41 nt, synthetic construct
  source 1..41: mol_type = other RNA
aacatagtgttcaggtggacttttggatgtccaagcaccac

SEQ ID NO: 1983 - RNA, 41 nt, synthetic construct
  source 1..41: mol_type = other RNA
aacatagtgttcaggaggacttttgggtgttcaagcaccac

SEQ ID NO: 1984 - RNA, 41 nt, synthetic construct
  source 1..41: mol_type = other RNA
aacatagtgcccaggaggatttttaggtgtccaagcaccac

SEQ ID NO: 1985 - RNA, 41 nt, synthetic construct
  source 1..41: mol_type = other RNA
gtgttcagctggacttttaggtgtccaagtgccacttttgg

SEQ ID NO: 1986 - RNA, 41 nt, synthetic construct
  source 1..41: mol_type = other RNA
gtgttcaggtgggcttttgggtgtccaagcatgacttttgg

SEQ ID NO: 1987 - RNA, 40 nt, synthetic construct
  source 1..40: mol_type = other RNA
aggtggactttcgggtgtccaagcacaaatttggagggag

SEQ ID NO: 1988 - RNA, 41 nt, synthetic construct
  source 1..41: mol_type = other RNA
gtgttcaggtgggcttttgggtgtccaagcacaacttttgg

SEQ ID NO: 1989 - RNA, 41 nt, synthetic construct
  source 1..41: mol_type = other RNA
aggtggacttttaggtgcccaaggacctcttttggagggag

SEQ ID NO: 1990 - RNA, 32 nt, synthetic construct
  source 1..32: mol_type = other RNA
tgttcaggtggacttctgtggtgtccaagcac

SEQ ID NO: 1991 - RNA, 52 nt, synthetic construct
  source 1..52: mol_type = other RNA
aggtggactcttgggtgtccaagcacgccaaaaataccactttgggagggag

SEQ ID NO: 1992 - RNA, 41 nt, synthetic construct
  source 1..41: mol_type = other RNA
aggtggactcatgggcgtccaagcaccactcttggagggag

SEQ ID NO: 1993 - RNA, 41 nt, synthetic construct
  source 1..41: mol_type = other RNA
aggtggacctttgggtgtccaagcaacccttttggagggag

SEQ ID NO: 1994 - RNA, 31 nt, synthetic construct
  source 1..31: mol_type = other RNA
ggtggacctttgggtgttcaagcaccacttt

SEQ ID NO: 1995 - RNA, 41 nt, synthetic construct
  source 1..41: mol_type = other RNA
gtgttcagctggactttttggtgtccaagcgccacttttgg

SEQ ID NO: 1996 - RNA, 41 nt, synthetic construct
  source 1..41: mol_type = other RNA
gtgttcaggtggacgtttggcttcccaagaaccacttttgg

SEQ ID NO: 1997 - RNA, 41 nt, synthetic construct
  source 1..41: mol_type = other RNA
aggtggactgtttggtgtccaagtatcacttttggagggag

SEQ ID NO: 1998 - RNA, 41 nt, synthetic construct
  source 1..41: mol_type = other RNA
aggtggacgtttgggtgtccaaacaccacttttggagggag

SEQ ID NO: 1999 - RNA, 39 nt, synthetic construct
  source 1..39: mol_type = other RNA
aacatagtgtaggtggacctttggatgtccaagcaccac

SEQ ID NO: 2000 - RNA, 41 nt, synthetic construct
  source 1..41: mol_type = other RNA
aacatagtactcaggtggactttggggtgttcaagcaccac

SEQ ID NO: 2001 - RNA, 41 nt, synthetic construct
  source 1..41: mol_type = other RNA
aggtggacttttgggtgtccaagcattcattttggagggag

SEQ ID NO: 2002 - RNA, 30 nt, synthetic construct
  source 1..30: mol_type = other RNA
tgttcaggggacttttggatatccaagcac

SEQ ID NO: 2003 - RNA, 47 nt, synthetic construct
  source 1..47: mol_type = other RNA
aacatagtttccaggtggacttgagattttggctgtccaagcaccac

SEQ ID NO: 2004 - RNA, 41 nt, synthetic construct
  source 1..41: mol_type = other RNA
gtgttcaggtggacctggcggtgtccaagcaccacttttgg

SEQ ID NO: 2005 - RNA, 41 nt, synthetic construct
  source 1..41: mol_type = other RNA
gtgttcaggtggacttgtgggtgtccaagcaccacttttgg

SEQ ID NO: 2006 - RNA, 31 nt, synthetic construct
  source 1..31: mol_type = other RNA
tgttcaggtgcacttttgggtgtccaagcac

SEQ ID NO: 2007 - RNA, 41 nt, synthetic construct
  source 1..41: mol_type = other RNA
aacatagtgttccggtggacttttgggtgcccaagcaccac

SEQ ID NO: 2008 - RNA, 41 nt, synthetic construct
  source 1..41: mol_type = other RNA
aacatagtgttcgggaggacttttgggtgtccaagcaccac

SEQ ID NO: 2009 - RNA, 42 nt, synthetic construct
  source 1..42: mol_type = other RNA
aggtggacttgttgggtggccaagcatacgcattggagggag

SEQ ID NO: 2010 - RNA, 42 nt, synthetic construct
  source 1..42: mol_type = other RNA
aacatagtgttaccgtggacctcagggtggtccaagcaccac

SEQ ID NO: 2011 - RNA, 41 nt, synthetic construct
  source 1..41: mol_type = other RNA
aacatagtgttcagctggactttttggtggccaagcaccac

SEQ ID NO: 2012 - RNA, 31 nt, synthetic construct
  source 1..31: mol_type = other RNA
tgttcaggtggactcctgggtgtccaagcac

SEQ ID NO: 2013 - RNA, 31 nt, synthetic construct
  source 1..31: mol_type = other RNA
tgttcagctggactttgaggtgtccaagcac

SEQ ID NO: 2014 - RNA, 40 nt, synthetic construct
  source 1..40: mol_type = other RNA
gtgttcagggggacttttgggtgtccaaggccacttttgg

SEQ ID NO: 2015 - RNA, 41 nt, synthetic construct
  source 1..41: mol_type = other RNA
aacatagttgtcaggcggacttttgggaatccaagcaccac

SEQ ID NO: 2016 - RNA, 31 nt, synthetic construct
  source 1..31: mol_type = other RNA
ggtgtccaaggaccacttttggggcgagatt

SEQ ID NO: 2017 - RNA, 41 nt, synthetic construct
  source 1..41: mol_type = other RNA
aacatagtgttcgggaggatttttggatctccaagcaccac

SEQ ID NO: 2018 - RNA, 43 nt, synthetic construct
  source 1..43: mol_type = other RNA
aggtggacgtttgggcgtccaaacaccagtacattggagggag

SEQ ID NO: 2019 - RNA, 41 nt, synthetic construct
  source 1..41: mol_type = other RNA
aggtggacctttgggtgttcaagcatactttttggagggag

SEQ ID NO: 2020 - RNA, 41 nt, synthetic construct
  source 1..41: mol_type = other RNA
gtgttcaggtgggatattgggtgttcaagcacaacttttgg

SEQ ID NO: 2021 - RNA, 41 nt, synthetic construct
  source 1..41: mol_type = other RNA
aacatagtcttcagctggacttttaggtatccaagcaccac

SEQ ID NO: 2022 - RNA, 41 nt, synthetic construct
  source 1..41: mol_type = other RNA
aacatagtgatcaggaggacttttgggtgtccaagcaccac

SEQ ID NO: 2023 - RNA, 42 nt, synthetic construct
  source 1..42: mol_type = other RNA
aggtggacttctgtggtgtccaagcatactttctggagggag

SEQ ID NO: 2024 - RNA, 40 nt, synthetic construct
  source 1..40: mol_type = other RNA
gtgttcaggtaggctttgggtgtccaagcacaacttttgg

SEQ ID NO: 2025 - RNA, 41 nt, synthetic construct
  source 1..41: mol_type = other RNA
gtgttcaggtggactttcgggtgtccaagcacaacttttgg

SEQ ID NO: 2026 - RNA, 41 nt, synthetic construct
  source 1..41: mol_type = other RNA
gtgttcaggtggacttttgggtgttcaagcaacacttttgg

SEQ ID NO: 2027 - RNA, 41 nt, synthetic construct
  source 1..41: mol_type = other RNA
aacatagtggtcaggtggacctttgggtgtccaagcaccac

SEQ ID NO: 2028 - RNA, 31 nt, synthetic construct
  source 1..31: mol_type = other RNA
tgttcacctggactttttggtatccaagcac

SEQ ID NO: 2029 - RNA, 27 nt, synthetic construct
  source 1..27: mol_type = other RNA
ggtgtccaagcccattggagggagatt

SEQ ID NO: 2030 - RNA, 31 nt, synthetic construct
  source 1..31: mol_type = other RNA
tgttcaggtagatttttgggtgtccaagcac

SEQ ID NO: 2031 - RNA, 52 nt, synthetic construct
  source 1..52: mol_type = other RNA
aggtggacttttaggtgtccaaacaccacaccaaaaataccattggagggag

SEQ ID NO: 2032 - RNA, 41 nt, synthetic construct
  source 1..41: mol_type = other RNA
aggtggacttttgggaatccaagcaccccttttggagggag

SEQ ID NO: 2033 - RNA, 31 nt, synthetic construct
  source 1..31: mol_type = other RNA
tgttcaggtggattgtttggtgtccaagcac

SEQ ID NO: 2034 - RNA, 42 nt, synthetic construct
  source 1..42: mol_type = other RNA
aacatagttgttcaggtggatgtttgggtgtccaagcaccac

SEQ ID NO: 2035 - RNA, 41 nt, synthetic construct
  source 1..41: mol_type = other RNA
gtgttcagggggccttttaggtgtccaagcaccacttttgg

SEQ ID NO: 2036 - RNA, 31 nt, synthetic construct
  source 1..31: mol_type = other RNA
tgttcaggcggacttttgggaatccaagcac

SEQ ID NO: 2037 - RNA, 41 nt, synthetic construct
  source 1..41: mol_type = other RNA
aggtggacttttggatgtccaagcacaggttttggagggag

SEQ ID NO: 2038 - RNA, 33 nt, synthetic construct
  source 1..33: mol_type = other RNA
tgttcaggtggacttttgcgggtgtccaagcac

SEQ ID NO: 2039 - RNA, 32 nt, synthetic construct
  source 1..32: mol_type = other RNA
tgttcaggcggacttttgggtggtccaagcac

SEQ ID NO: 2040 - RNA, 41 nt, synthetic construct
  source 1..41: mol_type = other RNA
gtgttcaggtggtcttgttgggtggccaagcatacttttgg

SEQ ID NO: 2041 - RNA, 31 nt, synthetic construct
  source 1..31: mol_type = other RNA
tgttccggtggacttctgggtgtccaagcac

SEQ ID NO: 2042 - RNA, 41 nt, synthetic construct
  source 1..41: mol_type = other RNA
aacatagtgttcaggtggacttttgggtgtccaagcaccac

SEQ ID NO: 2043 - RNA, 41 nt, synthetic construct
  source 1..41: mol_type = other RNA
aggtggacttttgggtgtccaagcaacatttttggagggag

SEQ ID NO: 2044 - RNA, 41 nt, synthetic construct
  source 1..41: mol_type = other RNA
gtgttcagctggaattttaggtgtccaagcaccacttttgg

SEQ ID NO: 2045 - RNA, 41 nt, synthetic construct
  source 1..41: mol_type = other RNA
aggtggacttttaggtgtccaaggaccacttttggagggag

SEQ ID NO: 2046 - RNA, 41 nt, synthetic construct
  source 1..41: mol_type = other RNA
gtgttcaggtgggcttgtgggtgttcaagcaccacttttgg

SEQ ID NO: 2047 - RNA, 31 nt, synthetic construct
  source 1..31: mol_type = other RNA
tgttcaggtggacttttgcgtgtccaagcac

SEQ ID NO: 2048 - RNA, 41 nt, synthetic construct
  source 1..41: mol_type = other RNA
aggtggacttttgggtgtccaagcattcgttttggagggag

SEQ ID NO: 2049 - RNA, 31 nt, synthetic construct
  source 1..31: mol_type = other RNA
tgttcagctggacttttaggtatccaagcac

SEQ ID NO: 2050 - RNA, 31 nt, synthetic construct
  source 1..31: mol_type = other RNA
tgttcaggtggacttgtgggtgtccaagcac

SEQ ID NO: 2051 - RNA, 42 nt, synthetic construct
  source 1..42: mol_type = other RNA
gtgttcaggcggacttttgggtggtccaagcacgacttttgg

SEQ ID NO: 2052 - RNA, 41 nt, synthetic construct
  source 1..41: mol_type = other RNA
aggtggacttttgggcgtccaagcacaacttttggagggag

SEQ ID NO: 2053 - RNA, 40 nt, synthetic construct
  source 1..40: mol_type = other RNA
aggtggacttttgggtgtccaagctccattttggagggag

SEQ ID NO: 2054 - RNA, 41 nt, synthetic construct
  source 1..41: mol_type = other RNA
aggtggacttttgggtgtccaagccccaattttggagggag

SEQ ID NO: 2055 - RNA, 31 nt, synthetic construct
  source 1..31: mol_type = other RNA
tgttcaggtggagctttaggtgtccaagcac

SEQ ID NO: 2056 - RNA, 38 nt, synthetic construct
  source 1..38: mol_type = other RNA
aggtggactattaggtgttcaagcacttttggagggag

SEQ ID NO: 2057 - RNA, 41 nt, synthetic construct
  source 1..41: mol_type = other RNA
aacatagtgtccagggggacttttgggtgtccaagcaccac

SEQ ID NO: 2058 - RNA, 41 nt, synthetic construct
  source 1..41: mol_type = other RNA
gtgttcagctgaactttttggtgtccaaggaccacttttgg

SEQ ID NO: 2059 - RNA, 41 nt, synthetic construct
  source 1..41: mol_type = other RNA
gtgttcaggaggatttttaggtgtccaagcaccacttttgg

SEQ ID NO: 2060 - RNA, 41 nt, synthetic construct
  source 1..41: mol_type = other RNA
aacatagtgttcggctgtacttttcggtgtccaagcaccac

SEQ ID NO: 2061 - RNA, 41 nt, synthetic construct
  source 1..41: mol_type = other RNA
aacatagtgttacggtggacgtttggcttcccaagcaccac

SEQ ID NO: 2062 - RNA, 41 nt, synthetic construct
  source 1..41: mol_type = other RNA
gtgttcagctggactttgtggtgtccaagcgtcacttttgg

SEQ ID NO: 2063 - RNA, 31 nt, synthetic construct
  source 1..31: mol_type = other RNA
ggtgtccaagcacactatttggagggagatt

SEQ ID NO: 2064 - RNA, 31 nt, synthetic construct
  source 1..31: mol_type = other RNA
tgttcaggtggcattttgggtgtccaagcac

SEQ ID NO: 2065 - RNA, 41 nt, synthetic construct
  source 1..41: mol_type = other RNA
aggtggactattgggtgtccaagcacccgacttggagggag

SEQ ID NO: 2066 - RNA, 41 nt, synthetic construct
  source 1..41: mol_type = other RNA
gtgttcaggtgcacttttgggtgtccaagcaccacttttgg

SEQ ID NO: 2067 - RNA, 41 nt, synthetic construct
  source 1..41: mol_type = other RNA
aacatagtgttcaggtgggcttttgggtgtccaagcaccac

SEQ ID NO: 2068 - RNA, 31 nt, synthetic construct
  source 1..31: mol_type = other RNA
tgttcaggtgggcttttgggtgtccaagcac

SEQ ID NO: 2069 - RNA, 41 nt, synthetic construct
  source 1..41: mol_type = other RNA
aacatagttttcaggtgcacttttgggtgtccaagcaccac

SEQ ID NO: 2070 - RNA, 47 nt, synthetic construct
  source 1..47: mol_type = other RNA
gtgttcaggtggacttgagattttggctgtccaagcacaacttttgg

SEQ ID NO: 2071 - RNA, 31 nt, synthetic construct
  source 1..31: mol_type = other RNA
tgttcaggtggacttctgggtgtccaagcac

SEQ ID NO: 2072 - RNA, 31 nt, synthetic construct
  source 1..31: mol_type = other RNA
tgttcaggtgcgcgtttgggcgtccaagcac

SEQ ID NO: 2073 - RNA, 41 nt, synthetic construct
  source 1..41: mol_type = other RNA
gtgttcaggtggcattttgggtgtccaagctccacttttgg

SEQ ID NO: 2074 - RNA, 41 nt, synthetic construct
  source 1..41: mol_type = other RNA
aggtggactttggggtgttcaagcaccacttatggagggag

SEQ ID NO: 2075 - RNA, 31 nt, synthetic construct
  source 1..31: mol_type = other RNA
tgttcgggaggatttttggatctccaagcac

SEQ ID NO: 2076 - RNA, 32 nt, synthetic construct
  source 1..32: mol_type = other RNA
cttttgtggtgtccaagcatactttctggagg

SEQ ID NO: 2077 - RNA, 41 nt, synthetic construct
  source 1..41: mol_type = other RNA
gtgttcaggtggacttttaggtgtccaaacaccacttttgg

SEQ ID NO: 2078 - RNA, 41 nt, synthetic construct
  source 1..41: mol_type = other RNA
aacatagtgttccattggccttgttggtatccaagcaccac

SEQ ID NO: 2079 - RNA, 31 nt, synthetic construct
  source 1..31: mol_type = other RNA
tgttcagggggacttttgggtgtccaagcac

SEQ ID NO: 2080 - RNA, 41 nt, synthetic construct
  source 1..41: mol_type = other RNA
aggtggactttagggtgtccaagaaccaattctggagggag

SEQ ID NO: 2081 - RNA, 41 nt, synthetic construct
  source 1..41: mol_type = other RNA
aggtggactttttggtgtccaagctgcccttttggagggag

SEQ ID NO: 2082 - RNA, 31 nt, synthetic construct
  source 1..31: mol_type = other RNA
tgttctggtggactttcgggtgtccaagcac

SEQ ID NO: 2083 - RNA, 41 nt, synthetic construct
  source 1..41: mol_type = other RNA
gtgttcaggtgggatattgggtgtccaagcaccacttttgg

SEQ ID NO: 2084 - RNA, 41 nt, synthetic construct
  source 1..41: mol_type = other RNA
gtgttcaggtggcctttcgggtgttcaagcaccacttttgg

SEQ ID NO: 2085 - RNA, 42 nt, synthetic construct
  source 1..42: mol_type = other RNA
aggtggacctcagggtggtccaagcaccacttttggagggag

SEQ ID NO: 2086 - RNA, 40 nt, synthetic construct
  source 1..40: mol_type = other RNA
gtgttcaggggacttttggatatccaagcacaacttttgg

SEQ ID NO: 2087 - RNA, 31 nt, synthetic construct
  source 1..31: mol_type = other RNA
tgttcaggtggacctttgggtgtccaagcac

SEQ ID NO: 2088 - RNA, 31 nt, synthetic construct
  source 1..31: mol_type = other RNA
tgttcagctggacttctaggtgtccaagcac

SEQ ID NO: 2089 - RNA, 41 nt, synthetic construct
  source 1..41: mol_type = other RNA
aggtggacttttgggtgtccaagactcgtttttggagggag

SEQ ID NO: 2090 - RNA, 41 nt, synthetic construct
  source 1..41: mol_type = other RNA
aggtggacttttgagtgtccaaccaccatttttggagggag

SEQ ID NO: 2091 - RNA, 41 nt, synthetic construct
  source 1..41: mol_type = other RNA
gtgttcaggtggacctttgggtgtccaagcaccacttttgg

SEQ ID NO: 2092 - RNA, 43 nt, synthetic construct
  source 1..43: mol_type = other RNA
aggtggacttttgggtgtccaagcatgacttccttggagggag

SEQ ID NO: 2093 - RNA, 31 nt, synthetic construct
  source 1..31: mol_type = other RNA
tgttcaggtgggcttgtgggtgttcaagcac

SEQ ID NO: 2094 - RNA, 41 nt, synthetic construct
  source 1..41: mol_type = other RNA
gtgttcaggtggacttttgggcgtccaagcacaacttttgg

SEQ ID NO: 2095 - RNA, 41 nt, synthetic construct
  source 1..41: mol_type = other RNA
aacatagtgttcagctgggcttttaggtggccaagcaccac

SEQ ID NO: 2096 - RNA, 41 nt, synthetic construct
  source 1..41: mol_type = other RNA
gtgttcagctggacttttttgtgtccaagcgtcacttttgg

SEQ ID NO: 2097 - RNA, 31 nt, synthetic construct
  source 1..31: mol_type = other RNA
tgttccggtggacctttgggtgttcaagcac

SEQ ID NO: 2098 - RNA, 30 nt, synthetic construct
  source 1..30: mol_type = other RNA
tgttcaggtggtttttgggtgtccaagcac

SEQ ID NO: 2099 - RNA, 41 nt, synthetic construct
  source 1..41: mol_type = other RNA
gtgttcaggtggacttttgcgtgtccaagcaacacttttgg

SEQ ID NO: 2100 - RNA, 41 nt, synthetic construct
  source 1..41: mol_type = other RNA
aggtggacttttatgtgtccaagcgtccctttgggagggag

SEQ ID NO: 2101 - RNA, 31 nt, synthetic construct
  source 1..31: mol_type = other RNA
tgttcaggtggactcatgggcgtccaagcac

SEQ ID NO: 2102 - RNA, 31 nt, synthetic construct
  source 1..31: mol_type = other RNA
tgttcaggaggacttttgggtgtccaagcac

SEQ ID NO: 2103 - RNA, 41 nt, synthetic construct
  source 1..41: mol_type = other RNA
gtgttcaggtggagctttaggtgtccaagcaccacttttgg

SEQ ID NO: 2104 - RNA, 41 nt, synthetic construct
  source 1..41: mol_type = other RNA
gtgttcaggtgggcttttgggtgttcaagcattacttttgg

SEQ ID NO: 2105 - RNA, 31 nt, synthetic construct
  source 1..31: mol_type = other RNA
tgttcaggtggcctttagggtgtccaagcac

SEQ ID NO: 2106 - RNA, 43 nt, synthetic construct
  source 1..43: mol_type = other RNA
gtgttcaggtggacttctaggttcgtccaagcaatacttttgg

SEQ ID NO: 2107 - RNA, 41 nt, synthetic construct
  source 1..41: mol_type = other RNA
acttttgggtgtccaagtatcacttttggagtgagatttcg

SEQ ID NO: 2108 - RNA, 31 nt, synthetic construct
  source 1..31: mol_type = other RNA
ggactttcgggtgtccaagcacaaattttgg

SEQ ID NO: 2109 - RNA, 41 nt, synthetic construct
  source 1..41: mol_type = other RNA
gtgttcagttgaactttttggtgtccaaggaccacttttgg

SEQ ID NO: 2110 - RNA, 32 nt, synthetic construct
  source 1..32: mol_type = other RNA
ggtgtccaagcaccacatttgagagggagatt

SEQ ID NO: 2111 - RNA, 31 nt, synthetic construct
  source 1..31: mol_type = other RNA
tgttcaggtgggatattgggtgttcaagcac

SEQ ID NO: 2112 - RNA, 31 nt, synthetic construct
  source 1..31: mol_type = other RNA
tgttcagctggacttttaggtgcccaagcac

SEQ ID NO: 2113 - RNA, 33 nt, synthetic construct
  source 1..33: mol_type = other RNA
ggacttttgcgggtgtccaagcatcatttttgg

SEQ ID NO: 2114 - RNA, 40 nt, synthetic construct
  source 1..40: mol_type = other RNA
aggtggactttgggtgtccaagcacacactttggagggag

SEQ ID NO: 2115 - RNA, 41 nt, synthetic construct
  source 1..41: mol_type = other RNA
acttttgggtatccaaggaaaacttttcgggcgagatttcg

SEQ ID NO: 2116 - RNA, 41 nt, synthetic construct
  source 1..41: mol_type = other RNA
gtgttcaggtggacttttgggtgtccaagcattacttttgg

SEQ ID NO: 2117 - RNA, 32 nt, synthetic construct
  source 1..32: mol_type = other RNA
tgttcagctggactttttggatgtccaagcac

SEQ ID NO: 2118 - RNA, 41 nt, synthetic construct
  source 1..41: mol_type = other RNA
gtgttcaggtggacttttgggtgtccaagcaacacttttgg

SEQ ID NO: 2119 - RNA, 45 nt, synthetic construct
  source 1..45: mol_type = other RNA
aacatagtgtaggatcaggtggacgtttgggtgtccaagcaccac

SEQ ID NO: 2120 - RNA, 52 nt, synthetic construct
  source 1..52: mol_type = other RNA
acttttgggtgtccaagcacgccaaaaataccactttgggagggagatttcg

SEQ ID NO: 2121 - RNA, 41 nt, synthetic construct
  source 1..41: mol_type = other RNA
gtgttcagctgtactttacggtgtccaagcagaacttttgg

SEQ ID NO: 2122 - RNA, 41 nt, synthetic construct
  source 1..41: mol_type = other RNA
aggtggactttttggtggccaagcgccacttttggagggag

SEQ ID NO: 2123 - RNA, 41 nt, synthetic construct
  source 1..41: mol_type = other RNA
acttttgggtgtccaagcaacccttttggagggagatttcg

SEQ ID NO: 2124 - RNA, 31 nt, synthetic construct
  source 1..31: mol_type = other RNA
tgttcagctgaacttttaggtgtccaagcac

SEQ ID NO: 2125 - RNA, 31 nt, synthetic construct
  source 1..31: mol_type = other RNA
tgttcaggaggatttttaggtgtccaagcac

SEQ ID NO: 2126 - RNA, 31 nt, synthetic construct
  source 1..31: mol_type = other RNA
tgttcgggtggactcttgggtgtccaagcac

SEQ ID NO: 2127 - RNA, 40 nt, synthetic construct
  source 1..40: mol_type = other RNA
gtgttcaggtggaatattaggtgttcaagcacacttttgg

SEQ ID NO: 2128 - RNA, 41 nt, synthetic construct
  source 1..41: mol_type = other RNA
aggtggacttttgggtgtccaagcactccttgcggagggag

SEQ ID NO: 2129 - RNA, 41 nt, synthetic construct
  source 1..41: mol_type = other RNA
aggtggacttttgggtgtccaagcactgcttttggagggag

SEQ ID NO: 2130 - RNA, 31 nt, synthetic construct
  source 1..31: mol_type = other RNA
ggtgtccaagtgccacttttggagggagatt

SEQ ID NO: 2131 - RNA, 41 nt, synthetic construct
  source 1..41: mol_type = other RNA
gtgttcagctggacttttaggtggccaagcgacacttttgg

SEQ ID NO: 2132 - RNA, 41 nt, synthetic construct
  source 1..41: mol_type = other RNA
aggtggactgttggctgtccaagcaccacttttggagggag

SEQ ID NO: 2133 - RNA, 41 nt, synthetic construct
  source 1..41: mol_type = other RNA
aggtggacgtttggcttcccaagaacccattttggagggag

SEQ ID NO: 2134 - RNA, 41 nt, synthetic construct
  source 1..41: mol_type = other RNA
gtgttcaggtggacttttgggtgttcaagcacaacttttgg

SEQ ID NO: 2135 - RNA, 41 nt, synthetic construct
  source 1..41: mol_type = other RNA
acttttgggtgtccaaacaccacttttggaaggagatttcg

SEQ ID NO: 2136 - RNA, 31 nt, synthetic construct
  source 1..31: mol_type = other RNA
tgttcaggtggactttaggtagtccaagcac

SEQ ID NO: 2137 - RNA, 41 nt, synthetic construct
  source 1..41: mol_type = other RNA
aggtggacttgtgggtgttcaagcaccacttgaggagggag

SEQ ID NO: 2138 - RNA, 31 nt, synthetic construct
  source 1..31: mol_type = other RNA
tgttcagctcgactttttggtgtccaagcac

SEQ ID NO: 2139 - RNA, 31 nt, synthetic construct
  source 1..31: mol_type = other RNA
tgttccggtggacctggcggtgtccaagcac

SEQ ID NO: 2140 - RNA, 31 nt, synthetic construct
  source 1..31: mol_type = other RNA
ggtgtccaagcactgcttgtggaggtagatt

SEQ ID NO: 2141 - RNA, 41 nt, synthetic construct
  source 1..41: mol_type = other RNA
gtgttcaggtggacttttgggttgccaagcaccacttttgg

SEQ ID NO: 2142 - RNA, 31 nt, synthetic construct
  source 1..31: mol_type = other RNA
tgttcaggtggacttttgggtgtccaagcac

SEQ ID NO: 2143 - RNA, 41 nt, synthetic construct
  source 1..41: mol_type = other RNA
acttttgggtgtccaagcgtccctttgggagggagatttcg

SEQ ID NO: 2144 - RNA, 41 nt, synthetic construct
  source 1..41: mol_type = other RNA
acttttgggtgtccaagcgtcacttttggagggagatttcg

SEQ ID NO: 2145 - RNA, 31 nt, synthetic construct
  source 1..31: mol_type = other RNA
tgttcagctggacttttaggtgtccaagcac

SEQ ID NO: 2146 - RNA, 31 nt, synthetic construct
  source 1..31: mol_type = other RNA
tgttcaggggaacttctgggtgtccaagcac

SEQ ID NO: 2147 - RNA, 41 nt, synthetic construct
  source 1..41: mol_type = other RNA
acttttgggtatccaagcaccgcttttggagggagatttcg

SEQ ID NO: 2148 - RNA, 41 nt, synthetic construct
  source 1..41: mol_type = other RNA
gtgttcaggtggactttggggtgttcaagcaccacttttgg

SEQ ID NO: 2149 - RNA, 40 nt, synthetic construct
  source 1..40: mol_type = other RNA
aggtggacttttgggtgtccaaggccacttttggagggag

SEQ ID NO: 2150 - RNA, 41 nt, synthetic construct
  source 1..41: mol_type = other RNA
gtgttcagctggaattttcggtgtccaagcgccacttttgg

SEQ ID NO: 2151 - RNA, 30 nt, synthetic construct
  source 1..30: mol_type = other RNA
ggtgtccaagcacaaatttggagggagatt

SEQ ID NO: 2152 - RNA, 41 nt, synthetic construct
  source 1..41: mol_type = other RNA
aacatagtgttcagctggacttttaggtgtccaagcaccac

SEQ ID NO: 2153 - RNA, 31 nt, synthetic construct
  source 1..31: mol_type = other RNA
tgttcaggtggaactttgggtgttcaagcac

SEQ ID NO: 2154 - RNA, 31 nt, synthetic construct
  source 1..31: mol_type = other RNA
tgttcaggtggactttggggtgttcaagcac

SEQ ID NO: 2155 - RNA, 44 nt, synthetic construct
  source 1..44: mol_type = other RNA
acttttgggtgtccaagcgacccaccttttggagggagatttcg

SEQ ID NO: 2156 - RNA, 31 nt, synthetic construct
  source 1..31: mol_type = other RNA
tgttcagctggacttttttgtgtccaagcac

SEQ ID NO: 2157 - RNA, 41 nt, synthetic construct
  source 1..41: mol_type = other RNA
aacatagtgttcacgtggacttttgcgtgttccagcaccac

SEQ ID NO: 2158 - RNA, 41 nt, synthetic construct
  source 1..41: mol_type = other RNA
aacatagtgttcaatcggacttttgggtgtccaagcaccac

SEQ ID NO: 2159 - RNA, 41 nt, synthetic construct
  source 1..41: mol_type = other RNA
aggtggacttttgggtgcccaacccccacttttggagggag

SEQ ID NO: 2160 - RNA, 41 nt, synthetic construct
  source 1..41: mol_type = other RNA
gtgttcaggaggacttttgggtgtccaagcactacttttgg

SEQ ID NO: 2161 - RNA, 41 nt, synthetic construct
  source 1..41: mol_type = other RNA
acttttggctgtccaagcaccacttttggagctagatttcg

SEQ ID NO: 2162 - RNA, 44 nt, synthetic construct
  source 1..44: mol_type = other RNA
gtgttcaggtgttacacttttgggtgtccaagactcacttttgg

SEQ ID NO: 2163 - RNA, 41 nt, synthetic construct
  source 1..41: mol_type = other RNA
gtgttcaggtgggcttttgggtgtccaagcactacttttgg

SEQ ID NO: 2164 - RNA, 41 nt, synthetic construct
  source 1..41: mol_type = other RNA
aggtggacctggcggtgtccaagcaccacttctggagggag

SEQ ID NO: 2165 - RNA, 32 nt, synthetic construct
  source 1..32: mol_type = other RNA
tgttcgggtggacttatgggtaatccaagcac

SEQ ID NO: 2166 - RNA, 43 nt, synthetic construct
  source 1..43: mol_type = other RNA
acttttgggtgtccaagcagatcacttggggagggagatttcg

SEQ ID NO: 2167 - RNA, 31 nt, synthetic construct
  source 1..31: mol_type = other RNA
ggacttttaggtgcccaaggacctcttttgg

SEQ ID NO: 2168 - RNA, 41 nt, synthetic construct
  source 1..41: mol_type = other RNA
aggtggacttttaggtatccaaggaaaacttttggagggag

SEQ ID NO: 2169 - RNA, 41 nt, synthetic construct
  source 1..41: mol_type = other RNA
aggtggactttcgggtgttcaagcacccgtcttggagggag

SEQ ID NO: 2170 - RNA, 41 nt, synthetic construct
  source 1..41: mol_type = other RNA
gtgttcaggtggacttttaggtgtccaggtaccacttttgg

SEQ ID NO: 2171 - RNA, 31 nt, synthetic construct
  source 1..31: mol_type = other RNA
tgttcagctggactttttggtgtccaagcac

SEQ ID NO: 2172 - RNA, 41 nt, synthetic construct
  source 1..41: mol_type = other RNA
aacatagtctccaggtggccttttgggtgttcaagcaccac

SEQ ID NO: 2173 - RNA, 31 nt, synthetic construct
  source 1..31: mol_type = other RNA
ggtggactttcgggtgtccaagcacaacttt

SEQ ID NO: 2174 - RNA, 41 nt, synthetic construct
  source 1..41: mol_type = other RNA
gtgttcagctcgacttttaggtgtccaagctgcacttttgg

SEQ ID NO: 2175 - RNA, 41 nt, synthetic construct
  source 1..41: mol_type = other RNA
aggtggacttttgggtgtccaagcacatcttttggagggag

SEQ ID NO: 2176 - RNA, 32 nt, synthetic construct
  source 1..32: mol_type = other RNA
tgttccggtggtcttgttgggtggccaagcac

SEQ ID NO: 2177 - RNA, 47 nt, synthetic construct
  source 1..47: mol_type = other RNA
aggtggacttgagattttggctgtccaagcacacattttggagggag

SEQ ID NO: 2178 - RNA, 31 nt, synthetic construct
  source 1..31: mol_type = other RNA
tgttcagttgaactttttggtgtccaagcac

SEQ ID NO: 2179 - RNA, 41 nt, synthetic construct
  source 1..41: mol_type = other RNA
gtgttcaggtggccttttgggtgttcaaccatcacttttgg

SEQ ID NO: 2180 - RNA, 41 nt, synthetic construct
  source 1..41: mol_type = other RNA
aggtggacttttgggttgccaagcaccacttatggagggag

SEQ ID NO: 2181 - RNA, 41 nt, synthetic construct
  source 1..41: mol_type = other RNA
aggtggacttttcggtgtccaagcgccacttttggagggag

SEQ ID NO: 2182 - RNA, 31 nt, synthetic construct
  source 1..31: mol_type = other RNA
tgttcaggtggccttttgggtgttcaagcac

SEQ ID NO: 2183 - RNA, 31 nt, synthetic construct
  source 1..31: mol_type = other RNA
cttttgggtgttcaagcacaacttttggagg

SEQ ID NO: 2184 - RNA, 44 nt, synthetic construct
  source 1..44: mol_type = other RNA
aacatagtatgattcaggtggagctttaggtgtccaagcaccac

SEQ ID NO: 2185 - RNA, 41 nt, synthetic construct
  source 1..41: mol_type = other RNA
aggtggacttttaggtgtccaagcaccacttttggagggag

SEQ ID NO: 2186 - RNA, 41 nt, synthetic construct
  source 1..41: mol_type = other RNA
acttttggatgtccaagctccattaaaggacggagatttcg

SEQ ID NO: 2187 - RNA, 41 nt, synthetic construct
  source 1..41: mol_type = other RNA
acttttgggcgtccaagcacaacttttggagggagatttcg

SEQ ID NO: 2188 - RNA, 41 nt, synthetic construct
  source 1..41: mol_type = other RNA
gtgttcagctgaaattttcggtgtccaagcgccacttttgg

SEQ ID NO: 2189 - RNA, 41 nt, synthetic construct
  source 1..41: mol_type = other RNA
acttttgggtgtccaagctgcccttttggacggagatttcg

SEQ ID NO: 2190 - RNA, 41 nt, synthetic construct
  source 1..41: mol_type = other RNA
aggtggacttttaggtgtccaagcgccacttttggagggag

SEQ ID NO: 2191 - RNA, 38 nt, synthetic construct
  source 1..38: mol_type = other RNA
aggtggacttttgggatgtccaagcccattggagggag

SEQ ID NO: 2192 - RNA, 42 nt, synthetic construct
  source 1..42: mol_type = other RNA
cttttgggtgtccaagcacgccaaaaataccactttgggagg

SEQ ID NO: 2193 - RNA, 41 nt, synthetic construct
  source 1..41: mol_type = other RNA
aggtggacttttgggtgttcaagcacaaattttggagggag

SEQ ID NO: 2194 - RNA, 31 nt, synthetic construct
  source 1..31: mol_type = other RNA
ctttttggtgtccaagtgccacttttggagg

SEQ ID NO: 2195 - RNA, 43 nt, synthetic construct
  source 1..43: mol_type = other RNA
gtgttcaggtgggctttggggtgttcaagcccaccacttttgg

SEQ ID NO: 2196 - RNA, 41 nt, synthetic construct
  source 1..41: mol_type = other RNA
gtgttcagctgggctttttggtggccaagcgccacttttgg

SEQ ID NO: 2197 - RNA, 41 nt, synthetic construct
  source 1..41: mol_type = other RNA
gtgttcaggaggacttttgggtgttcaagcaccacttttgg

SEQ ID NO: 2198 - RNA, 40 nt, synthetic construct
  source 1..40: mol_type = other RNA
aggtggacctttaggtgtccaagcaccactttggagggag

SEQ ID NO: 2199 - RNA, 41 nt, synthetic construct
  source 1..41: mol_type = other RNA
ttgggtgtccaagtgcgctatttggagggagatttcgctcc

SEQ ID NO: 2200 - RNA, 40 nt, synthetic construct
  source 1..40: mol_type = other RNA
gtgttcaggtggaactttgggtgttcaagcatacttttgg

SEQ ID NO: 2201 - RNA, 31 nt, synthetic construct
  source 1..31: mol_type = other RNA
tgttcagctggaattttaggtgtccaagcac

SEQ ID NO: 2202 - RNA, 31 nt, synthetic construct
  source 1..31: mol_type = other RNA
tgttccggtggacttttgggttgccaagcac

SEQ ID NO: 2203 - RNA, 41 nt, synthetic construct
  source 1..41: mol_type = other RNA
aggtggacttctgggtgtccaagcactgcttgtggagggag

SEQ ID NO: 2204 - RNA, 42 nt, synthetic construct
  source 1..42: mol_type = other RNA
acttttgggatgtccaaggaccacttttggaacgagatttcg

SEQ ID NO: 2205 - RNA, 31 nt, synthetic construct
  source 1..31: mol_type = other RNA
cttttgggtgagcaagcaccacttttggagg

SEQ ID NO: 2206 - RNA, 31 nt, synthetic construct
  source 1..31: mol_type = other RNA
tgttcaggtgggctttggggtgttcaagcac

SEQ ID NO: 2207 - RNA, 41 nt, synthetic construct
  source 1..41: mol_type = other RNA
acttttgggtgtccaagcattcattttggagggagatttcg

SEQ ID NO: 2208 - RNA, 41 nt, synthetic construct
  source 1..41: mol_type = other RNA
aggtggacttttgggtgtccaagcaccacttttggagggag

SEQ ID NO: 2209 - RNA, 31 nt, synthetic construct
  source 1..31: mol_type = other RNA
ggacttttgggtgcccaacccccacttttgg

SEQ ID NO: 2210 - RNA, 30 nt, synthetic construct
  source 1..30: mol_type = other RNA
tgttcaggtaggctttgggtgtccaagcac

SEQ ID NO: 2211 - RNA, 41 nt, synthetic construct
  source 1..41: mol_type = other RNA
acttttgggtgtccaagcaccatttttggaggaagatttcg

SEQ ID NO: 2212 - RNA, 41 nt, synthetic construct
  source 1..41: mol_type = other RNA
aggtggacttttgggtgtccaagcaccacatttggagggag

SEQ ID NO: 2213 - RNA, 42 nt, synthetic construct
  source 1..42: mol_type = other RNA
acttttgggtggtccaagcaccacttttggagggagatttcg

SEQ ID NO: 2214 - RNA, 41 nt, synthetic construct
  source 1..41: mol_type = other RNA
gtgttcaggtggacttttgggtgtccaagcgtcacttttgg

SEQ ID NO: 2215 - RNA, 31 nt, synthetic construct
  source 1..31: mol_type = other RNA
tgttcgggaggacttttgggtgtccaagcac

SEQ ID NO: 2216 - RNA, 31 nt, synthetic construct
  source 1..31: mol_type = other RNA
tgttcagctgggcttttaggtggccaagcac

SEQ ID NO: 2217 - RNA, 31 nt, synthetic construct
  source 1..31: mol_type = other RNA
tgttcaggtgggcttttgggtgttcaagcac

SEQ ID NO: 2218 - RNA, 31 nt, synthetic construct
  source 1..31: mol_type = other RNA
ggtggacttttcggtgtccaagcagaacttt

SEQ ID NO: 2219 - RNA, 40 nt, synthetic construct
  source 1..40: mol_type = other RNA
acttttgggtgtccaagcacaaatttggagggagatttcg

SEQ ID NO: 2220 - RNA, 31 nt, synthetic construct
  source 1..31: mol_type = other RNA
tgttcaggtggaatattaggtgttcaagcac

SEQ ID NO: 2221 - RNA, 41 nt, synthetic construct
  source 1..41: mol_type = other RNA
aggtggacttgtgggtgtccaagcaccacttatggagggag

SEQ ID NO: 2222 - RNA, 31 nt, synthetic construct
  source 1..31: mol_type = other RNA
tgttcaggaggacttttgggtgttcaagcac

SEQ ID NO: 2223 - RNA, 30 nt, synthetic construct
  source 1..30: mol_type = other RNA
ggtgtccaaggccacttttggagggagatt

SEQ ID NO: 2224 - RNA, 43 nt, synthetic construct
  source 1..43: mol_type = other RNA
aggtggacttctaggttcgtccaagcaatcattgcggagggag

SEQ ID NO: 2225 - RNA, 41 nt, synthetic construct
  source 1..41: mol_type = other RNA
acttttgggtgtccaagactcgtttttggagggagatttcg

SEQ ID NO: 2226 - RNA, 41 nt, synthetic construct
  source 1..41: mol_type = other RNA
gtgttcaggtagatttttgggtgtccaagcaccacttttgg

SEQ ID NO: 2227 - RNA, 41 nt, synthetic construct
  source 1..41: mol_type = other RNA
acttttgggtgtccaagcattcgttttggagggagatttcg

SEQ ID NO: 2228 - RNA, 41 nt, synthetic construct
  source 1..41: mol_type = other RNA
aggtggacctttgggtgttcaagcaccacttttggagggag

SEQ ID NO: 2229 - RNA, 31 nt, synthetic construct
  source 1..31: mol_type = other RNA
cttttgggtgtccaagccccaattttggagg

SEQ ID NO: 2230 - RNA, 31 nt, synthetic construct
  source 1..31: mol_type = other RNA
cttttaggtatccaagctccacttttggagg

SEQ ID NO: 2231 - RNA, 31 nt, synthetic construct
  source 1..31: mol_type = other RNA
ggtggactcttgggtgtccaagcacgacttt

SEQ ID NO: 2232 - RNA, 31 nt, synthetic construct
  source 1..31: mol_type = other RNA
ctttttggtgtccaagctgcccttttggagg

SEQ ID NO: 2233 - RNA, 41 nt, synthetic construct
  source 1..41: mol_type = other RNA
acttttgggtgttcaagcacaacacttgtagggagatttcg

SEQ ID NO: 2234 - RNA, 41 nt, synthetic construct
  source 1..41: mol_type = other RNA
aggtggacttttggatctccatgcagcaattttggagggag

SEQ ID NO: 2235 - RNA, 33 nt, synthetic construct
  source 1..33: mol_type = other RNA
tgttcaggtggacttctaggttcgtccaagcac

SEQ ID NO: 2236 - RNA, 34 nt, synthetic construct
  source 1..34: mol_type = other RNA
tgttcaggtgatacacttttgggtgtccaagcac

SEQ ID NO: 2237 - RNA, 31 nt, synthetic construct
  source 1..31: mol_type = other RNA
ggtggacctttgggtgtccaagcaccacttt

SEQ ID NO: 2238 - RNA, 41 nt, synthetic construct
  source 1..41: mol_type = other RNA
ttgggtgtccaagcaccccttttcgagggagatttcgctcc

SEQ ID NO: 2239 - RNA, 41 nt, synthetic construct
  source 1..41: mol_type = other RNA
aggtggacttttgggtgttcaagcacaacttttggagggag

SEQ ID NO: 2240 - RNA, 41 nt, synthetic construct
  source 1..41: mol_type = other RNA
acttttgggtgtccaagcgccacttttggggggagatttcg

SEQ ID NO: 2241 - RNA, 31 nt, synthetic construct
  source 1..31: mol_type = other RNA
ggacttttgggtatccaagcaccgtttttgg

SEQ ID NO: 2242 - RNA, 41 nt, synthetic construct
  source 1..41: mol_type = other RNA
acttttgggtgtccaagcacccgacttgtagggagatttcg

SEQ ID NO: 2243 - RNA, 41 nt, synthetic construct
  source 1..41: mol_type = other RNA
acttttgggtgtccaagcatactttctggaggaagatttcg

SEQ ID NO: 2244 - RNA, 31 nt, synthetic construct
  source 1..31: mol_type = other RNA
tgttcggctgtacttttcggtgtccaagcac

SEQ ID NO: 2245 - RNA, 31 nt, synthetic construct
  source 1..31: mol_type = other RNA
tgttcagggggccttttaggtgtccaagcac

SEQ ID NO: 2246 - RNA, 42 nt, synthetic construct
  source 1..42: mol_type = other RNA
aacatagtcctcaggcggacttttgggtggtccaagcaccac

SEQ ID NO: 2247 - RNA, 41 nt, synthetic construct
  source 1..41: mol_type = other RNA
acttttgggtgttcaagcatactttttggaggaagatttcg

SEQ ID NO: 2248 - RNA, 31 nt, synthetic construct
  source 1..31: mol_type = other RNA
tgttctggtgggtgtttgggtatccaagcac

SEQ ID NO: 2249 - RNA, 33 nt, synthetic construct
  source 1..33: mol_type = other RNA
ggacttctaggttcgtccaagcaatcattttgg

SEQ ID NO: 2250 - RNA, 41 nt, synthetic construct
  source 1..41: mol_type = other RNA
acttttgggtgttcaagcacaacttttggggggagatttcg

SEQ ID NO: 2251 - RNA, 31 nt, synthetic construct
  source 1..31: mol_type = other RNA
tgttccggtggacttttgggtgtccaagcac

SEQ ID NO: 2252 - RNA, 41 nt, synthetic construct
  source 1..41: mol_type = other RNA
gtgttcaggaggacttttgggtgtccaagcaccacttttgg

SEQ ID NO: 2253 - RNA, 31 nt, synthetic construct
  source 1..31: mol_type = other RNA
ggtgtccaagcgtcacttttggagggagatt

SEQ ID NO: 2254 - RNA, 41 nt, synthetic construct
  source 1..41: mol_type = other RNA
gtgttcaggtggacctttgggtgttcaagcaccacttttgg

SEQ ID NO: 2255 - RNA, 41 nt, synthetic construct
  source 1..41: mol_type = other RNA
aggtggactttggggtgttcaagcccaccgattggagggag

SEQ ID NO: 2256 - RNA, 39 nt, synthetic construct
  source 1..39: mol_type = other RNA
acttttgggtgtccaagctccattttgagggagatttcg

SEQ ID NO: 2257 - RNA, 40 nt, synthetic construct
  source 1..40: mol_type = other RNA
gtgttcaggtggactgggttccacagtgcaaaacttttgg

SEQ ID NO: 2258 - RNA, 40 nt, synthetic construct
  source 1..40: mol_type = other RNA
acttttggtgtccaagcacacactttggaaggagatttcg

SEQ ID NO: 2259 - RNA, 41 nt, synthetic construct
  source 1..41: mol_type = other RNA
aggtggacttttgggtgtccaagcaccgcttttggagggag

SEQ ID NO: 2260 - RNA, 31 nt, synthetic construct
  source 1..31: mol_type = other RNA
tgttcagctggactttttggtggccaagcac

SEQ ID NO: 2261 - RNA, 31 nt, synthetic construct
  source 1..31: mol_type = other RNA
ggtgttcaagcaccacttttggaggaagatt

SEQ ID NO: 2262 - RNA, 31 nt, synthetic construct
  source 1..31: mol_type = other RNA
tgttccggtggacttttgggtgcccaagcac

SEQ ID NO: 2263 - RNA, 41 nt, synthetic construct
  source 1..41: mol_type = other RNA
aggtggacttttaggtgtccaagcaccccttttggagggag

SEQ ID NO: 2264 - RNA, 41 nt, synthetic construct
  source 1..41: mol_type = other RNA
aggtggacttttgggtgttcaagcacacgttttggagggag

SEQ ID NO: 2265 - RNA, 42 nt, synthetic construct
  source 1..42: mol_type = other RNA
aggtggacttttgggtgtccaagcaccatcggatggagggag

SEQ ID NO: 2266 - RNA, 41 nt, synthetic construct
  source 1..41: mol_type = other RNA
acttttgggtgtccaagcaccacttttggagggagatttcg

SEQ ID NO: 2267 - RNA, 41 nt, synthetic construct
  source 1..41: mol_type = other RNA
ttgggtgtccaagcaatcattgcggaggtagatttcgctcc

SEQ ID NO: 2268 - RNA, 41 nt, synthetic construct
  source 1..41: mol_type = other RNA
aacatagtgttcaggtggattgttggctgtccaagcaccac

SEQ ID NO: 2269 - RNA, 41 nt, synthetic construct
  source 1..41: mol_type = other RNA
ttgggtgtccaagcacactatttggagggtgatttcgctcc

SEQ ID NO: 2270 - RNA, 41 nt, synthetic construct
  source 1..41: mol_type = other RNA
aggtggacttttgggtgttcaagcaacggttttggagggag

SEQ ID NO: 2271 - RNA, 31 nt, synthetic construct
  source 1..31: mol_type = other RNA
ggtgtccaagcaacccttttggagggagatt

SEQ ID NO: 2272 - RNA, 41 nt, synthetic construct
  source 1..41: mol_type = other RNA
aggtggacgtttgggtgtccaagcaccatttttggagggag

SEQ ID NO: 2273 - RNA, 41 nt, synthetic construct
  source 1..41: mol_type = other RNA
ttgggtgtccaagcaacccttttggagggaaatttcgctcc

SEQ ID NO: 2274 - RNA, 31 nt, synthetic construct
  source 1..31: mol_type = other RNA
ggtggacttgtgggtgtccaagcaccacttt

SEQ ID NO: 2275 - RNA, 41 nt, synthetic construct
  source 1..41: mol_type = other RNA
ttgggtgtccaagcacacactttggaaggagatttcgctcc

SEQ ID NO: 2276 - RNA, 41 nt, synthetic construct
  source 1..41: mol_type = other RNA
ttgggtgtccaagcgccacttttggggggagatttcgctcc

SEQ ID NO: 2277 - RNA, 41 nt, synthetic construct
  source 1..41: mol_type = other RNA
acttttgggcgtccaagcaccactcttgaagggagatttcg

SEQ ID NO: 2278 - RNA, 31 nt, synthetic construct
  source 1..31: mol_type = other RNA
tgttcagctggaattttcggtgtccaagcac

SEQ ID NO: 2279 - RNA, 41 nt, synthetic construct
  source 1..41: mol_type = other RNA
acttttgggtgtccaagaaccaattctcgagggagatttcg

SEQ ID NO: 2280 - RNA, 40 nt, synthetic construct
  source 1..40: mol_type = other RNA
acttttgggtgtccaaggccacttttggagggagatttcg

SEQ ID NO: 2281 - RNA, 41 nt, synthetic construct
  source 1..41: mol_type = other RNA
acttttgggtatccaagctccacttttgggtggagatttcg

SEQ ID NO: 2282 - RNA, 37 nt, synthetic construct
  source 1..37: mol_type = other RNA
tgttcaggtggacttgagattttggctgtccaagcac

SEQ ID NO: 2283 - RNA, 34 nt, synthetic construct
  source 1..34: mol_type = other RNA
cttttgggtgtccaagcgacccaccttttggagg

SEQ ID NO: 2284 - RNA, 41 nt, synthetic construct
  source 1..41: mol_type = other RNA
acttttggatgtccaagcaccacttttggagggagatttcg

SEQ ID NO: 2285 - RNA, 41 nt, synthetic construct
  source 1..41: mol_type = other RNA
acttttgggtgtccaaggaccacttttggagcgagatttcg

SEQ ID NO: 2286 - RNA, 41 nt, synthetic construct
  source 1..41: mol_type = other RNA
aggtggacttttgggtgtccaagcaccacttagggagggag

SEQ ID NO: 2287 - RNA, 41 nt, synthetic construct
  source 1..41: mol_type = other RNA
aggtggacgtttggatgtccaagcaccacttttggagggag

SEQ ID NO: 2288 - RNA, 31 nt, synthetic construct
  source 1..31: mol_type = other RNA
ggtgtccaagcgtccctttgggagggagatt

SEQ ID NO: 2289 - RNA, 37 nt, synthetic construct
  source 1..37: mol_type = other RNA
ggtggacttgagattttggctgtccaagcacaacttt

SEQ ID NO: 2290 - RNA, 31 nt, synthetic construct
  source 1..31: mol_type = other RNA
ggtggacttttgggtgtccaagcgtcacttt

SEQ ID NO: 2291 - RNA, 41 nt, synthetic construct
  source 1..41: mol_type = other RNA
acttttgggtggccaagcgccacttttggggggagatttcg

SEQ ID NO: 2292 - RNA, 41 nt, synthetic construct
  source 1..41: mol_type = other RNA
aggtggacttttgggtgttcaaccatcactcttggagggag

SEQ ID NO: 2293 - RNA, 41 nt, synthetic construct
  source 1..41: mol_type = other RNA
aggtggacttttgggtgtccaagcaccacatccggagggag

SEQ ID NO: 2294 - RNA, 31 nt, synthetic construct
  source 1..31: mol_type = other RNA
ggtgggcgtttgggcgtccaaacaccacttt

SEQ ID NO: 2295 - RNA, 31 nt, synthetic construct
  source 1..31: mol_type = other RNA
ggtggccttttaggtgtccaagcaccacttt

SEQ ID NO: 2296 - RNA, 41 nt, synthetic construct
  source 1..41: mol_type = other RNA
ttgggtgtccaagactcgtttttggagggagatttcgctcc

SEQ ID NO: 2297 - RNA, 31 nt, synthetic construct
  source 1..31: mol_type = other RNA
ggtgtccaagcacaacttttggagggagatt

SEQ ID NO: 2298 - RNA, 32 nt, synthetic construct
  source 1..32: mol_type = other RNA
cttttaggatgtccaaggaccacttttggagg

SEQ ID NO: 2299 - RNA, 41 nt, synthetic construct
  source 1..41: mol_type = other RNA
aggtggacttttgggtgttcaagcaccacttttggagggag

SEQ ID NO: 2300 - RNA, 30 nt, synthetic construct
  source 1..30: mol_type = other RNA
cttttgggtgtccaagctccattttggagg

SEQ ID NO: 2301 - RNA, 41 nt, synthetic construct
  source 1..41: mol_type = other RNA
aggtggacttttaggtgtccaagcaccacatttggagggag

SEQ ID NO: 2302 - RNA, 41 nt, synthetic construct
  source 1..41: mol_type = other RNA
ttgggtgtccaacccccacttttggagggagatttcgctcc

SEQ ID NO: 2303 - RNA, 31 nt, synthetic construct
  source 1..31: mol_type = other RNA
ggacttttgggtgtccaagcaccatctttgg

SEQ ID NO: 2304 - RNA, 31 nt, synthetic construct
  source 1..31: mol_type = other RNA
ggtggacttttaggtgtccaaacaccacttt

SEQ ID NO: 2305 - RNA, 31 nt, synthetic construct
  source 1..31: mol_type = other RNA
ggtgtccaagcaccacatccggggggagatt

SEQ ID NO: 2306 - RNA, 41 nt, synthetic construct
  source 1..41: mol_type = other RNA
gtgttcaggtggacttttgggtgtccaagcaccacttttgg

SEQ ID NO: 2307 - RNA, 41 nt, synthetic construct
  source 1..41: mol_type = other RNA
aacatagtgttccggtcgatgcctaggtgatcgagcaccac

SEQ ID NO: 2308 - RNA, 31 nt, synthetic construct
  source 1..31: mol_type = other RNA
cttttgggtgtccaagcaacccttttggagg

SEQ ID NO: 2309 - RNA, 31 nt, synthetic construct
  source 1..31: mol_type = other RNA
tgttcaggtggacgtttgggtgtccaagcac

SEQ ID NO: 2310 - RNA, 33 nt, synthetic construct
  source 1..33: mol_type = other RNA
cttttgggtgtccaagcatgacttccttggagg

SEQ ID NO: 2311 - RNA, 41 nt, synthetic construct
  source 1..41: mol_type = other RNA
ttgggtgtccaagcaccactttggagaggatgtttcgctcc

SEQ ID NO: 2312 - RNA, 46 nt, synthetic construct
  source 1..46: mol_type = other RNA
aacatagtggggagttccggtggacctttgggtgttcaagcaccac

SEQ ID NO: 2313 - RNA, 31 nt, synthetic construct
  source 1..31: mol_type = other RNA
cttttgggaatccaagcaccccttttggagg

SEQ ID NO: 2314 - RNA, 41 nt, synthetic construct
  source 1..41: mol_type = other RNA
ttgggtgtccaagcattcattttggagggaggtttcgctcc

SEQ ID NO: 2315 - RNA, 41 nt, synthetic construct
  source 1..41: mol_type = other RNA
acttttgggaatccaagcaccccttttgtaacgagatttcg

SEQ ID NO: 2316 - RNA, 41 nt, synthetic construct
  source 1..41: mol_type = other RNA
acttttgggtgtccaagcacatcttttggacggagatttcg

SEQ ID NO: 2317 - RNA, 31 nt, synthetic construct
  source 1..31: mol_type = other RNA
ggtggacttttgggcgtccaagcacaacttt

SEQ ID NO: 2318 - RNA, 31 nt, synthetic construct
  source 1..31: mol_type = other RNA
ggtgggcgtttggatgtccaagcaccacttt

SEQ ID NO: 2319 - RNA, 30 nt, synthetic construct
  source 1..30: mol_type = other RNA
tgttcggtggacttttgggcgtccaagcac

SEQ ID NO: 2320 - RNA, 31 nt, synthetic construct
  source 1..31: mol_type = other RNA
ggacttttgggtgtccaaacaccacttttgg

SEQ ID NO: 2321 - RNA, 47 nt, synthetic construct
  source 1..47: mol_type = other RNA
aggtggactgggttccacagtgcaaatagatcgcattttggagggag

SEQ ID NO: 2322 - RNA, 32 nt, synthetic construct
  source 1..32: mol_type = other RNA
ggtggacttttaggatgtccaaggaccacttt

SEQ ID NO: 2323 - RNA, 31 nt, synthetic construct
  source 1..31: mol_type = other RNA
cttttggatatccaagcacaactcttggagg

SEQ ID NO: 2324 - RNA, 31 nt, synthetic construct
  source 1..31: mol_type = other RNA
ctttttggtgtccaagtatcacttttggagg

SEQ ID NO: 2325 - RNA, 31 nt, synthetic construct
  source 1..31: mol_type = other RNA
ggtggacgtttgggtgtccaagcaccacttt

SEQ ID NO: 2326 - RNA, 41 nt, synthetic construct
  source 1..41: mol_type = other RNA
acttttggctgtccaagcacacattttggcgggagatttcg

SEQ ID NO: 2327 - RNA, 41 nt, synthetic construct
  source 1..41: mol_type = other RNA
ttgggtgtccaagcaccacttatggagggagatttcgctcc

SEQ ID NO: 2328 - RNA, 41 nt, synthetic construct
  source 1..41: mol_type = other RNA
acttttgggtgttcaagcacacgttttggggggagatttcg

SEQ ID NO: 2329 - RNA, 31 nt, synthetic construct
  source 1..31: mol_type = other RNA
cttttgggcgtccaagcacaacttttggagg

SEQ ID NO: 2330 - RNA, 31 nt, synthetic construct
  source 1..31: mol_type = other RNA
cttttgggtgtccaagaaccaattctggagg

SEQ ID NO: 2331 - RNA, 41 nt, synthetic construct
  source 1..41: mol_type = other RNA
gtgttcagtcggacttttgggtgtccaagcaccacttttgg

SEQ ID NO: 2332 - RNA, 31 nt, synthetic construct
  source 1..31: mol_type = other RNA
ggtgtccaagcattcattttggagggagatt

SEQ ID NO: 2333 - RNA, 41 nt, synthetic construct
  source 1..41: mol_type = other RNA
acttttgggtgttcaagcacaaattttggggggagatttcg

SEQ ID NO: 2334 - RNA, 41 nt, synthetic construct
  source 1..41: mol_type = other RNA
acttttgggtggccaagcatacgcattggagggagatttcg

SEQ ID NO: 2335 - RNA, 31 nt, synthetic construct
  source 1..31: mol_type = other RNA
ctttttggtatccaagcaccgcttttggagg

SEQ ID NO: 2336 - RNA, 31 nt, synthetic construct
  source 1..31: mol_type = other RNA
tgttcaatcggacttttgggtgtccaagcac

SEQ ID NO: 2337 - RNA, 31 nt, synthetic construct
  source 1..31: mol_type = other RNA
ggtggacttttggatatccaagcacaacttt

SEQ ID NO: 2338 - RNA, 43 nt, synthetic construct
  source 1..43: mol_type = other RNA
acttttgggtgttcaagcattagtactttggtgggagatttcg

SEQ ID NO: 2339 - RNA, 41 nt, synthetic construct
  source 1..41: mol_type = other RNA
ttgggtgtccaagcgtctattttggagggagatttcgctcc

SEQ ID NO: 2340 - RNA, 31 nt, synthetic construct
  source 1..31: mol_type = other RNA
cttttaggtgtccaaggaccacttttggagg

SEQ ID NO: 2341 - RNA, 41 nt, synthetic construct
  source 1..41: mol_type = other RNA
acttttgggtgtccaagcaccccttttcgagggagatttcg

SEQ ID NO: 2342 - RNA, 31 nt, synthetic construct
  source 1..31: mol_type = other RNA
ggtggacatttggatgtccaagcaccacttt

SEQ ID NO: 2343 - RNA, 41 nt, synthetic construct
  source 1..41: mol_type = other RNA
ttgggtgtccaagcattcgttttggagggagccttcgctcc

SEQ ID NO: 2344 - RNA, 31 nt, synthetic construct
  source 1..31: mol_type = other RNA
cttttggatgtccaagcacaggttttggagg

SEQ ID NO: 2345 - RNA, 32 nt, synthetic construct
  source 1..32: mol_type = other RNA
ggtggacctcagggtggtccaagcaccacttt

SEQ ID NO: 2346 - RNA, 41 nt, synthetic construct
  source 1..41: mol_type = other RNA
ttgggtgtccaagcgtccctttgggagggagatttcgctcc

SEQ ID NO: 2347 - RNA, 30 nt, synthetic construct
  source 1..30: mol_type = other RNA
cttttgggtgtccaagcacaaatttggagg

SEQ ID NO: 2348 - RNA, 31 nt, synthetic construct
  source 1..31: mol_type = other RNA
ggtgtccaaggaccacttttggaacgagatt

SEQ ID NO: 2349 - RNA, 31 nt, synthetic construct
  source 1..31: mol_type = other RNA
cttttgggtgtccaagcattcgttttggagg

SEQ ID NO: 2350 - RNA, 32 nt, synthetic construct
  source 1..32: mol_type = other RNA
tgttcccgtggacctcagggtggtccaagcac

SEQ ID NO: 2351 - RNA, 41 nt, synthetic construct
  source 1..41: mol_type = other RNA
acttttgggtgtccaagcaccgcttttggagggagatttcg

SEQ ID NO: 2352 - RNA, 31 nt, synthetic construct
  source 1..31: mol_type = other RNA
cttttgggtgtccaagcacccgacttggagg

SEQ ID NO: 2353 - RNA, 41 nt, synthetic construct
  source 1..41: mol_type = other RNA
ttgggtgtccaagcgaccgttttggggggagatttcgctcc

SEQ ID NO: 2354 - RNA, 32 nt, synthetic construct
  source 1..32: mol_type = other RNA
ggtgtccaagcaccatcggatggagggagatt

SEQ ID NO: 2355 - RNA, 31 nt, synthetic construct
  source 1..31: mol_type = other RNA
ggtggactttttggtatccaagctccacttt

SEQ ID NO: 2356 - RNA, 31 nt, synthetic construct
  source 1..31: mol_type = other RNA
ggtgtccaaacaccacttttggaaggagatt

SEQ ID NO: 2357 - RNA, 31 nt, synthetic construct
  source 1..31: mol_type = other RNA
cttttgggtgtccaagcactgcttttggagg

SEQ ID NO: 2358 - RNA, 31 nt, synthetic construct
  source 1..31: mol_type = other RNA
tgttcaggtggacttttgggtgttcaagcac

SEQ ID NO: 2359 - RNA, 42 nt, synthetic construct
  source 1..42: mol_type = other RNA
acttttgggtgttcaagcaacggttttggagaagagatttcg

SEQ ID NO: 2360 - RNA, 31 nt, synthetic construct
  source 1..31: mol_type = other RNA
ggacttttgggtgtccaagcattcgttttgg

SEQ ID NO: 2361 - RNA, 41 nt, synthetic construct
  source 1..41: mol_type = other RNA
ttgggtgtccaagcatactttctggaggaggatttcgctcc

SEQ ID NO: 2362 - RNA, 52 nt, synthetic construct
  source 1..52: mol_type = other RNA
acttttgggtgtccaaacaccacaccaaaaataccattggcgggagatttcg

SEQ ID NO: 2363 - RNA, 31 nt, synthetic construct
  source 1..31: mol_type = other RNA
ggtggacttttggatgtccaagcacaacttt

SEQ ID NO: 2364 - RNA, 31 nt, synthetic construct
  source 1..31: mol_type = other RNA
ggtgtccaagctccacttttgggtggagatt

SEQ ID NO: 2365 - RNA, 41 nt, synthetic construct
  source 1..41: mol_type = other RNA
ttgggtgtccaagcacaacttttggagggagatttcgctcc

SEQ ID NO: 2366 - RNA, 31 nt, synthetic construct
  source 1..31: mol_type = other RNA
ggtggacctttgggtgtccaagcgacacttt

SEQ ID NO: 2367 - RNA, 31 nt, synthetic construct
  source 1..31: mol_type = other RNA
cttttaggtgtccaagcgtcacttttggagg

SEQ ID NO: 2368 - RNA, 31 nt, synthetic construct
  source 1..31: mol_type = other RNA
ggtgtccaacccccacttttggagggagatt

SEQ ID NO: 2369 - RNA, 44 nt, synthetic construct
  source 1..44: mol_type = other RNA
ttgggtgtccaagcgacccaccttttggagggagaattcgctcc

SEQ ID NO: 2370 - RNA, 43 nt, synthetic construct
  source 1..43: mol_type = other RNA
acttttgggtgtccaagcatgacttccttggtgggagatttcg

SEQ ID NO: 2371 - RNA, 31 nt, synthetic construct
  source 1..31: mol_type = other RNA
ggtggaattttaggtgtccaagcaccacttt

SEQ ID NO: 2372 - RNA, 41 nt, synthetic construct
  source 1..41: mol_type = other RNA
ttgggtgtccaagctgcccttttggacggagatttcgctcc

SEQ ID NO: 2373 - RNA, 30 nt, synthetic construct
  source 1..30: mol_type = other RNA
ggtgtccagcgccatttttggggggagatt

SEQ ID NO: 2374 - RNA, 41 nt, synthetic construct
  source 1..41: mol_type = other RNA
gtgttcaggtggactttaggtagtccacgcacaacttttgg

SEQ ID NO: 2375 - RNA, 31 nt, synthetic construct
  source 1..31: mol_type = other RNA
ggtggacttctgggtgtccaagcactacttt

SEQ ID NO: 2376 - RNA, 41 nt, synthetic construct
  source 1..41: mol_type = other RNA
ttgggtgtccaagcatacgcattggagggtaatttcgctcc

SEQ ID NO: 2377 - RNA, 31 nt, synthetic construct
  source 1..31: mol_type = other RNA
ggactttttggtgtccaaggaccacttttgg

SEQ ID NO: 2378 - RNA, 31 nt, synthetic construct
  source 1..31: mol_type = other RNA
ggtgtccaagactcgtttttggagggagatt

SEQ ID NO: 2379 - RNA, 32 nt, synthetic construct
  source 1..32: mol_type = other RNA
ggtggacttttgggtggtccaagcacgacttt

SEQ ID NO: 2380 - RNA, 31 nt, synthetic construct
  source 1..31: mol_type = other RNA
ggacttgttgggtggccaagcatacgtttgg

SEQ ID NO: 2381 - RNA, 31 nt, synthetic construct
  source 1..31: mol_type = other RNA
cttttgggtgtccaaacaccacttttggagg

SEQ ID NO: 2382 - RNA, 40 nt, synthetic construct
  source 1..40: mol_type = other RNA
gtgttcaggtggtttttgggtgtccaagcaccacttttgg

SEQ ID NO: 2383 - RNA, 41 nt, synthetic construct
  source 1..41: mol_type = other RNA
ttgggtgtccaagcaccacttttggagggagatttcgctcc

SEQ ID NO: 2384 - RNA, 42 nt, synthetic construct
  source 1..42: mol_type = other RNA
cttttaggtgtccaaacaccacaccaaaaataccattggagg

SEQ ID NO: 2385 - RNA, 31 nt, synthetic construct
  source 1..31: mol_type = other RNA
ggacttttgggcgtccaagcacaacttttgg

SEQ ID NO: 2386 - RNA, 41 nt, synthetic construct
  source 1..41: mol_type = other RNA
ttgggtgtccaagcaccacatccgggggggcgtttcgctcc

SEQ ID NO: 2387 - RNA, 32 nt, synthetic construct
  source 1..32: mol_type = other RNA
ggacttctgtggtgtccaagcatactttttgg

SEQ ID NO: 2388 - RNA, 40 nt, synthetic construct
  source 1..40: mol_type = other RNA
acttttgggtgtccaagcaccacatttgagggagatttcg

SEQ ID NO: 2389 - RNA, 31 nt, synthetic construct
  source 1..31: mol_type = other RNA
ggacttttgggtgtccaagcactccttttgg

SEQ ID NO: 2390 - RNA, 41 nt, synthetic construct
  source 1..41: mol_type = other RNA
aggtggacctttgggtgtccaagcaccatttttggagggag

SEQ ID NO: 2391 - RNA, 31 nt, synthetic construct
  source 1..31: mol_type = other RNA
ggtggactttgaggtgtccaagcgtcacttt

SEQ ID NO: 2392 - RNA, 31 nt, synthetic construct
  source 1..31: mol_type = other RNA
cttttggatgtccaagctccattaaaggagg

SEQ ID NO: 2393 - RNA, 41 nt, synthetic construct
  source 1..41: mol_type = other RNA
ttgggtgtccaaggaccacttttggaacgagatttcgctcc

SEQ ID NO: 2394 - RNA, 28 nt, synthetic construct
  source 1..28: mol_type = other RNA
cttttaggtgttcaagcacttttggagg

SEQ ID NO: 2395 - RNA, 41 nt, synthetic construct
  source 1..41: mol_type = other RNA
acttttgggtggccaagcgaccgttttggggggagatttcg

SEQ ID NO: 2396 - RNA, 33 nt, synthetic construct
  source 1..33: mol_type = other RNA
cttttgggcgtccaaacaccagtacattggagg

SEQ ID NO: 2397 - RNA, 34 nt, synthetic construct
  source 1..34: mol_type = other RNA
ctttttcggtgtccaagcagatcacttggggagg

SEQ ID NO: 2398 - RNA, 33 nt, synthetic construct
  source 1..33: mol_type = other RNA
ggtgtccaaacaccagtacattgtcgggagatt

SEQ ID NO: 2399 - RNA, 34 nt, synthetic construct
  source 1..34: mol_type = other RNA
ggtgtccaagcgacccaccttttggagggagatt

SEQ ID NO: 2400 - RNA, 31 nt, synthetic construct
  source 1..31: mol_type = other RNA
ggacttttaggtatccaaggaaaacttttgg

SEQ ID NO: 2401 - RNA, 40 nt, synthetic construct
  source 1..40: mol_type = other RNA
gtgttcaggtggacttttgggtgttcaagcacacttttgg

SEQ ID NO: 2402 - RNA, 41 nt, synthetic construct
  source 1..41: mol_type = other RNA
aacatagtcttccggtggacttttgggttgccaagcaccac

SEQ ID NO: 2403 - RNA, 40 nt, synthetic construct
  source 1..40: mol_type = other RNA
ttgggtgtccaagcacaaatttggagggagatttcgctcc

SEQ ID NO: 2404 - RNA, 41 nt, synthetic construct
  source 1..41: mol_type = other RNA
ttgggtgtccaagcatcatttttggagggagatttcgctcc

SEQ ID NO: 2405 - RNA, 31 nt, synthetic construct
  source 1..31: mol_type = other RNA
ggtggatttttgggtgtccaagcaccacttt

SEQ ID NO: 2406 - RNA, 31 nt, synthetic construct
  source 1..31: mol_type = other RNA
ggtgtccaagcacacactttggaaggagatt

SEQ ID NO: 2407 - RNA, 33 nt, synthetic construct
  source 1..33: mol_type = other RNA
ggtgtccaagcagatcacttggggagggagatt

SEQ ID NO: 2408 - RNA, 30 nt, synthetic construct
  source 1..30: mol_type = other RNA
cttttgggtgtccaaggccacttttggagg

SEQ ID NO: 2409 - RNA, 41 nt, synthetic construct
  source 1..41: mol_type = other RNA
ttgggtgtccaaggaaaacttttcgggcgagatttcgctcc

SEQ ID NO: 2410 - RNA, 42 nt, synthetic construct
  source 1..42: mol_type = other RNA
acttttgggtgtccaagcaccatcggatggagggagatttcg

SEQ ID NO: 2411 - RNA, 41 nt, synthetic construct
  source 1..41: mol_type = other RNA
aacatagttcttcggtggacctggcggtgtccaagcaccac

SEQ ID NO: 2412 - RNA, 31 nt, synthetic construct
  source 1..31: mol_type = other RNA
ggacttttgggtgtccaagccccaattttgg

SEQ ID NO: 2413 - RNA, 31 nt, synthetic construct
  source 1..31: mol_type = other RNA
ggtggatttttaggtgtccaagcaccacttt

SEQ ID NO: 2414 - RNA, 41 nt, synthetic construct
  source 1..41: mol_type = other RNA
ttgggtgtccaagctccacttttgggtggagatttcgctcc

SEQ ID NO: 2415 - RNA, 41 nt, synthetic construct
  source 1..41: mol_type = other RNA
ttgggtgtccaaggacctcttttggaacgagatttcgctcc

SEQ ID NO: 2416 - RNA, 31 nt, synthetic construct
  source 1..31: mol_type = other RNA
cttttgggtgtccaagcacatcttttggagg

SEQ ID NO: 2417 - RNA, 31 nt, synthetic construct
  source 1..31: mol_type = other RNA
ggtggactttttggtgtccaagcgccacttt

SEQ ID NO: 2418 - RNA, 41 nt, synthetic construct
  source 1..41: mol_type = other RNA
gtgttcaggaggatttttggatctccatgcagcacttttgg

SEQ ID NO: 2419 - RNA, 41 nt, synthetic construct
  source 1..41: mol_type = other RNA
ttgggtgtccaagcacacattttggcgggaggtttcgctcc

SEQ ID NO: 2420 - RNA, 43 nt, synthetic construct
  source 1..43: mol_type = other RNA
ttgggtgtccaagcagatcacttggggagggagctttcgctcc

SEQ ID NO: 2421 - RNA, 41 nt, synthetic construct
  source 1..41: mol_type = other RNA
ttgggtgtgcaagcaccacttttggagggagatttcgctcc

SEQ ID NO: 2422 - RNA, 42 nt, synthetic construct
  source 1..42: mol_type = other RNA
ttgggtgtccaagccccaattttggagggggaatttcgctcc

SEQ ID NO: 2423 - RNA, 31 nt, synthetic construct
  source 1..31: mol_type = other RNA
cttttgggtgtccaagcattcattttggagg

SEQ ID NO: 2424 - RNA, 41 nt, synthetic construct
  source 1..41: mol_type = other RNA
ttgggtgtccaagcgtcacttttggagggagatttcgctcc

SEQ ID NO: 2425 - RNA, 31 nt, synthetic construct
  source 1..31: mol_type = other RNA
ggacttggcggtgtccaagcaccacttttgg

SEQ ID NO: 2426 - RNA, 44 nt, synthetic construct
  source 1..44: mol_type = other RNA
acttttggggcgtccaaacaccagtacattgtcgggagatttcg

SEQ ID NO: 2427 - RNA, 31 nt, synthetic construct
  source 1..31: mol_type = other RNA
ggtgtccaagcattcgttttggagggagatt

SEQ ID NO: 2428 - RNA, 41 nt, synthetic construct
  source 1..41: mol_type = other RNA
ttgggtgtccaaggaccacttttggagcgagatttcgctcc

SEQ ID NO: 2429 - RNA, 31 nt, synthetic construct
  source 1..31: mol_type = other RNA
ggtggacctttggatgtccaagctccacttt

SEQ ID NO: 2430 - RNA, 41 nt, synthetic construct
  source 1..41: mol_type = other RNA
ttgggtgtccaagcaccacttttggagctaactttcgctcc

SEQ ID NO: 2431 - RNA, 31 nt, synthetic construct
  source 1..31: mol_type = other RNA
ggactattgggtgttcaagcacaacatttgg

SEQ ID NO: 2432 - RNA, 41 nt, synthetic construct
  source 1..41: mol_type = other RNA
acttttgggttgccaagcaccacttatggaggaagatttcg

SEQ ID NO: 2433 - RNA, 31 nt, synthetic construct
  source 1..31: mol_type = other RNA
ggtggacttttgggaatccaagcaccacttt

SEQ ID NO: 2434 - RNA, 31 nt, synthetic construct
  source 1..31: mol_type = other RNA
ggacttttatgtgtccaagcgtcccttttgg

SEQ ID NO: 2435 - RNA, 39 nt, synthetic construct
  source 1..39: mol_type = other RNA
ttgggtgtccaagctccattttgagggagatttcgctcc

SEQ ID NO: 2436 - RNA, 41 nt, synthetic construct
  source 1..41: mol_type = other RNA
ttgggtgtccaagcaccacttttggagggcgatttcgctcc

SEQ ID NO: 2437 - RNA, 30 nt, synthetic construct
  source 1..30: mol_type = other RNA
ggactttgggtgtccaagcacacactttgg

SEQ ID NO: 2438 - RNA, 31 nt, synthetic construct
  source 1..31: mol_type = other RNA
ggtgggcttgtgggtgttcaagcaccacttt

SEQ ID NO: 2439 - RNA, 31 nt, synthetic construct
  source 1..31: mol_type = other RNA
ggtgtccaagctgcccttttggacggagatt

SEQ ID NO: 2440 - RNA, 31 nt, synthetic construct
  source 1..31: mol_type = other RNA
cttttgggtgtccaagcaacatttttggagg

SEQ ID NO: 2441 - RNA, 31 nt, synthetic construct
  source 1..31: mol_type = other RNA
ggtggacctttgggtgtccaagcaacacttt

SEQ ID NO: 2442 - RNA, 31 nt, synthetic construct
  source 1..31: mol_type = other RNA
ggtgggtgtttgggtatccaagcaccacttt

SEQ ID NO: 2443 - RNA, 43 nt, synthetic construct
  source 1..43: mol_type = other RNA
acttttgggttcgtccaagcaatcattgcggaggtagatttcg

SEQ ID NO: 2444 - RNA, 31 nt, synthetic construct
  source 1..31: mol_type = other RNA
ggtggacctggcggtgtccaagcaccacttt

SEQ ID NO: 2445 - RNA, 52 nt, synthetic construct
  source 1..52: mol_type = other RNA
ttgggtgtccaagcacgccaaaaataccactttgggagggagatttcgctcc

SEQ ID NO: 2446 - RNA, 31 nt, synthetic construct
  source 1..31: mol_type = other RNA
cttttcggtgtccaagcgccacttttggagg

SEQ ID NO: 2447 - RNA, 31 nt, synthetic construct
  source 1..31: mol_type = other RNA
ggtggactttttggtgcccaaggaccacttt

SEQ ID NO: 2448 - RNA, 43 nt, synthetic construct
  source 1..43: mol_type = other RNA
aggtggacttttgggtgttcaagcattagtactttggagggag

SEQ ID NO: 2449 - RNA, 33 nt, synthetic construct
  source 1..33: mol_type = other RNA
ggacttttcggtgtccaagcagatcacttttgg

SEQ ID NO: 2450 - RNA, 31 nt, synthetic construct
  source 1..31: mol_type = other RNA
ggtggatgtttgggtgtccaaacaccacttt

SEQ ID NO: 2451 - RNA, 31 nt, synthetic construct
  source 1..31: mol_type = other RNA
ggacttttaggtgtccaagcaccccttttgg

SEQ ID NO: 2452 - RNA, 31 nt, synthetic construct
  source 1..31: mol_type = other RNA
ggtggacttctgtggtgtccaagcatacttt

SEQ ID NO: 2453 - RNA, 31 nt, synthetic construct
  source 1..31: mol_type = other RNA
ggtggacttttgcgtgtccaagcaacacttt

SEQ ID NO: 2454 - RNA, 31 nt, synthetic construct
  source 1..31: mol_type = other RNA
ggtggccttgttggtatccaagcaccacttt

SEQ ID NO: 2455 - RNA, 41 nt, synthetic construct
  source 1..41: mol_type = other RNA
acttttgggtgttcaaccatcactcttgtagggagatttcg

SEQ ID NO: 2456 - RNA, 31 nt, synthetic construct
  source 1..31: mol_type = other RNA
ggacttttggatatccaagcacaacttttgg

SEQ ID NO: 2457 - RNA, 31 nt, synthetic construct
  source 1..31: mol_type = other RNA
ggtgggcttttgggtgtccaagcactacttt

SEQ ID NO: 2458 - RNA, 41 nt, synthetic construct
  source 1..41: mol_type = other RNA
acttttgggtgtccaagtgccacttttggagggagatttcg

SEQ ID NO: 2459 - RNA, 31 nt, synthetic construct
  source 1..31: mol_type = other RNA
ggacttttaggtgtccaaggaccacttttgg

SEQ ID NO: 2460 - RNA, 30 nt, synthetic construct
  source 1..30: mol_type = other RNA
cttttggtgtccaagcacacactttggagg

SEQ ID NO: 2461 - RNA, 31 nt, synthetic construct
  source 1..31: mol_type = other RNA
cttttgggtgtccaagactcgtttttggagg

SEQ ID NO: 2462 - RNA, 47 nt, synthetic construct
  source 1..47: mol_type = other RNA
aacatagtgtctaggtggacttgaggttttggctgtccgagcaccac

SEQ ID NO: 2463 - RNA, 31 nt, synthetic construct
  source 1..31: mol_type = other RNA
ggacttgtgggtgtccaagcaccacttttgg

SEQ ID NO: 2464 - RNA, 31 nt, synthetic construct
  source 1..31: mol_type = other RNA
ggtgtccaagcatacgcattggagggagatt

SEQ ID NO: 2465 - RNA, 31 nt, synthetic construct
  source 1..31: mol_type = other RNA
ggtggacttttgggtgtccaagccccacttt

SEQ ID NO: 2466 - RNA, 40 nt, synthetic construct
  source 1..40: mol_type = other RNA
acttttgggtgttcaagcccaccgattggatcagatttcg

SEQ ID NO: 2467 - RNA, 31 nt, synthetic construct
  source 1..31: mol_type = other RNA
ggtgtccaagtatcacttttggagtgagatt

SEQ ID NO: 2468 - RNA, 33 nt, synthetic construct
  source 1..33: mol_type = other RNA
ggtggacttttgcgggtgtccaagcatcacttt

SEQ ID NO: 2469 - RNA, 41 nt, synthetic construct
  source 1..41: mol_type = other RNA
ttgggtgtccaagtgccacttttggagggagatttcgctcc

SEQ ID NO: 2470 - RNA, 31 nt, synthetic construct
  source 1..31: mol_type = other RNA
ggtgtccaagcaccatttttggaggaagatt

SEQ ID NO: 2471 - RNA, 31 nt, synthetic construct
  source 1..31: mol_type = other RNA
ggtgtgcaagcaccacttttggagggagatt

SEQ ID NO: 2472 - RNA, 41 nt, synthetic construct
  source 1..41: mol_type = other RNA
acttttgggtgtccaagcactccttgcggaggtagatttcg

SEQ ID NO: 2473 - RNA, 31 nt, synthetic construct
  source 1..31: mol_type = other RNA
ggacttttaggtgtccaagtgccacttttgg

SEQ ID NO: 2474 - RNA, 41 nt, synthetic construct
  source 1..41: mol_type = other RNA
acttttggatatccaagcacaactcttggagtaagatttcg

SEQ ID NO: 2475 - RNA, 31 nt, synthetic construct
  source 1..31: mol_type = other RNA
ggacttttgggtgtccaagcaacccttttgg

SEQ ID NO: 2476 - RNA, 32 nt, synthetic construct
  source 1..32: mol_type = other RNA
cttttgggtggtccaagcacgcaacttggagg

SEQ ID NO: 2477 - RNA, 41 nt, synthetic construct
  source 1..41: mol_type = other RNA
ttgggtgtccaagcaccacttatggaggaagatttcgctcc

SEQ ID NO: 2478 - RNA, 31 nt, synthetic construct
  source 1..31: mol_type = other RNA
ggtggactttggggtgttcaagcaccacttt

SEQ ID NO: 2479 - RNA, 31 nt, synthetic construct
  source 1..31: mol_type = other RNA
ggacttttgagtgtccaaccaccatttttgg

SEQ ID NO: 2480 - RNA, 31 nt, synthetic construct
  source 1..31: mol_type = other RNA
ggacttttgggtgtccaagcaacatttttgg

SEQ ID NO: 2481 - RNA, 31 nt, synthetic construct
  source 1..31: mol_type = other RNA
ggtggacttttgggtgtccaagcaacacttt

SEQ ID NO: 2482 - RNA, 41 nt, synthetic construct
  source 1..41: mol_type = other RNA
acttttgggtgttcaagcaccacttttggacggagatttcg

SEQ ID NO: 2483 - RNA, 40 nt, synthetic construct
  source 1..40: mol_type = other RNA
ttgggtgtccaaggccacttttggagggagatttcgctcc

SEQ ID NO: 2484 - RNA, 31 nt, synthetic construct
  source 1..31: mol_type = other RNA
ggtggactttttggtgtccaaggaccacttt

SEQ ID NO: 2485 - RNA, 31 nt, synthetic construct
  source 1..31: mol_type = other RNA
ggacttttgggtgtccaagctccatttttgg

SEQ ID NO: 2486 - RNA, 31 nt, synthetic construct
  source 1..31: mol_type = other RNA
ggtgtccaagcatactttctggaggaagatt

SEQ ID NO: 2487 - RNA, 41 nt, synthetic construct
  source 1..41: mol_type = other RNA
ttgggtgtccaaggaccacttttggggcgagatttcgctcc

SEQ ID NO: 2488 - RNA, 31 nt, synthetic construct
  source 1..31: mol_type = other RNA
ggtgtccaagcactgcttttgaggggagatt

SEQ ID NO: 2489 - RNA, 31 nt, synthetic construct
  source 1..31: mol_type = other RNA
cttttgggtgttcaagcccaccgattggagg

SEQ ID NO: 2490 - RNA, 31 nt, synthetic construct
  source 1..31: mol_type = other RNA
ctttttggtgtgcgagctaccattttggagg

SEQ ID NO: 2491 - RNA, 31 nt, synthetic construct
  source 1..31: mol_type = other RNA
ggtggactttttggtgtccaagctgcacttt

SEQ ID NO: 2492 - RNA, 41 nt, synthetic construct
  source 1..41: mol_type = other RNA
ttgggtgtccaaacaccacttttggaaggccatttcgctcc

SEQ ID NO: 2493 - RNA, 31 nt, synthetic construct
  source 1..31: mol_type = other RNA
ggtgggatattgggtgtccaagcaccacttt

SEQ ID NO: 2494 - RNA, 31 nt, synthetic construct
  source 1..31: mol_type = other RNA
ggtgttcaagcaccacttatggagggagatt

SEQ ID NO: 2495 - RNA, 41 nt, synthetic construct
  source 1..41: mol_type = other RNA
aggtggacttttgggggtccgagcaccgcttttggagggag

SEQ ID NO: 2496 - RNA, 41 nt, synthetic construct
  source 1..41: mol_type = other RNA
acttttgggtgttcaagcaccacttatggagggagatttcg

SEQ ID NO: 2497 - RNA, 38 nt, synthetic construct
  source 1..38: mol_type = other RNA
acttttgggatgtccaagcccattggagggagatttcg

SEQ ID NO: 2498 - RNA, 31 nt, synthetic construct
  source 1..31: mol_type = other RNA
ggtggacttttaggtgtccaaggaccacttt

SEQ ID NO: 2499 - RNA, 31 nt, synthetic construct
  source 1..31: mol_type = other RNA
ggtggacttttgggtgtccaagcactacttt

SEQ ID NO: 2500 - RNA, 31 nt, synthetic construct
  source 1..31: mol_type = other RNA
ggtggactcatgggcgtccaagcaccacttt

SEQ ID NO: 2501 - RNA, 31 nt, synthetic construct
  source 1..31: mol_type = other RNA
ctttttggtggccaagcgaccgttttggagg

SEQ ID NO: 2502 - RNA, 41 nt, synthetic construct
  source 1..41: mol_type = other RNA
ttgggtgtccaagcaccccttttgtaacgagatttcgctcc

SEQ ID NO: 2503 - RNA, 30 nt, synthetic construct
  source 1..30: mol_type = other RNA
ggacttttgcgtgtccaagcaacagtttgg

SEQ ID NO: 2504 - RNA, 31 nt, synthetic construct
  source 1..31: mol_type = other RNA
ggtggcctttcgggtgttcaagcaccacttt

SEQ ID NO: 2505 - RNA, 52 nt, synthetic construct
  source 1..52: mol_type = other RNA
ttgggtgtccaaacaccacaccaaaaataccattggcgggagatttcgctcc

SEQ ID NO: 2506 - RNA, 31 nt, synthetic construct
  source 1..31: mol_type = other RNA
ggtgtccaagcacatcttttggacggagatt

SEQ ID NO: 2507 - RNA, 31 nt, synthetic construct
  source 1..31: mol_type = other RNA
ggtggacttttaggtgtccaagtgccacttt

SEQ ID NO: 2508 - RNA, 31 nt, synthetic construct
  source 1..31: mol_type = other RNA
ggtggcattttgggtgtccaagctccacttt

SEQ ID NO: 2509 - RNA, 41 nt, synthetic construct
  source 1..41: mol_type = other RNA
ttgggtgtccaagctccattaaaggacggagatttcgctcc

SEQ ID NO: 2510 - RNA, 43 nt, synthetic construct
  source 1..43: mol_type = other RNA
ttgggtgtccaaacaccagtacattgtcgggagatttcgctcc

SEQ ID NO: 2511 - RNA, 41 nt, synthetic construct
  source 1..41: mol_type = other RNA
acttttgggtgtccaagcgccacttttggaaggagatttcg

SEQ ID NO: 2512 - RNA, 30 nt, synthetic construct
  source 1..30: mol_type = other RNA
ggtggtttttgggtgtccaagcaccacttt

SEQ ID NO: 2513 - RNA, 41 nt, synthetic construct
  source 1..41: mol_type = other RNA
ttgggtgtccaagcaccgcttttggagggagatttcgctcc

SEQ ID NO: 2514 - RNA, 30 nt, synthetic construct
  source 1..30: mol_type = other RNA
ggtggacttttgggtgtccaaggccacttt

SEQ ID NO: 2515 - RNA, 31 nt, synthetic construct
  source 1..31: mol_type = other RNA
ggtggacttttgggtgttcaagcaacacttt

SEQ ID NO: 2516 - RNA, 31 nt, synthetic construct
  source 1..31: mol_type = other RNA
cttttgggtgttcaagcacaaattttggagg

SEQ ID NO: 2517 - RNA, 30 nt, synthetic construct
  source 1..30: mol_type = other RNA
ggtgtccaagcaccacatttgagggagatt

SEQ ID NO: 2518 - RNA, 31 nt, synthetic construct
  source 1..31: mol_type = other RNA
cttttgggtgtccaagcaccacttatggagg

SEQ ID NO: 2519 - RNA, 31 nt, synthetic construct
  source 1..31: mol_type = other RNA
cttttgagtgtccaaccaccatttttggagg

SEQ ID NO: 2520 - RNA, 31 nt, synthetic construct
  source 1..31: mol_type = other RNA
cttttggatgtccaagcaccacttttggagg

SEQ ID NO: 2521 - RNA, 41 nt, synthetic construct
  source 1..41: mol_type = other RNA
ttgggtgtccaagcacgcaacttggaacttgatttcgctcc

SEQ ID NO: 2522 - RNA, 31 nt, synthetic construct
  source 1..31: mol_type = other RNA
ggtggacttttgggtgtccaagcaccacttt

SEQ ID NO: 2523 - RNA, 31 nt, synthetic construct
  source 1..31: mol_type = other RNA
ggacttttggatgtccaagcaccacttttgg

SEQ ID NO: 2524 - RNA, 31 nt, synthetic construct
  source 1..31: mol_type = other RNA
ggactattgggtgtccaagcacccgatttgg

SEQ ID NO: 2525 - RNA, 31 nt, synthetic construct
  source 1..31: mol_type = other RNA
ggtgtccaagcacccgacttgtagggagatt

SEQ ID NO: 2526 - RNA, 42 nt, synthetic construct
  source 1..42: mol_type = other RNA
acttttgggtgttcaagcacttttgtaggcacagagatttcg

SEQ ID NO: 2527 - RNA, 29 nt, synthetic construct
  source 1..29: mol_type = other RNA
ggtgtccaagctccattttgagggagatt

SEQ ID NO: 2528 - RNA, 31 nt, synthetic construct
  source 1..31: mol_type = other RNA
ggacttttgggtgtccaagcgtcaattttgg

SEQ ID NO: 2529 - RNA, 31 nt, synthetic construct
  source 1..31: mol_type = other RNA
cttttaggtggccaagcgccacttttggagg

SEQ ID NO: 2530 - RNA, 31 nt, synthetic construct
  source 1..31: mol_type = other RNA
tgttcagctgaaattttcggtgtccaagcac

SEQ ID NO: 2531 - RNA, 31 nt, synthetic construct
  source 1..31: mol_type = other RNA
ggacttttgggtgtccaagcattcattttgg

SEQ ID NO: 2532 - RNA, 41 nt, synthetic construct
  source 1..41: mol_type = other RNA
ttgggtgtccaagcaccacttctggagggaaacttcgctcc

SEQ ID NO: 2533 - RNA, 31 nt, synthetic construct
  source 1..31: mol_type = other RNA
ggtgttcaagcaccgcttttggagggagatt

SEQ ID NO: 2534 - RNA, 30 nt, synthetic construct
  source 1..30: mol_type = other RNA
ggtgggctttgggtgtccaagcacaacttt

SEQ ID NO: 2535 - RNA, 31 nt, synthetic construct
  source 1..31: mol_type = other RNA
cttttaggtgtccaagcaccacttttggagg

SEQ ID NO: 2536 - RNA, 31 nt, synthetic construct
  source 1..31: mol_type = other RNA
tgttccggtggacgtttggcttcccaagcac

SEQ ID NO: 2537 - RNA, 31 nt, synthetic construct
  source 1..31: mol_type = other RNA
ggtgtccaagaaccaattctcgagggagatt

SEQ ID NO: 2538 - RNA, 32 nt, synthetic construct
  source 1..32: mol_type = other RNA
ggacttcagggtggtccaagcaccacttttgg

SEQ ID NO: 2539 - RNA, 31 nt, synthetic construct
  source 1..31: mol_type = other RNA
ggacttttgggtgtccaagcacatcttttgg

SEQ ID NO: 2540 - RNA, 31 nt, synthetic construct
  source 1..31: mol_type = other RNA
cttttgggcgtccaagcaccactcttggagg

SEQ ID NO: 2541 - RNA, 31 nt, synthetic construct
  source 1..31: mol_type = other RNA
ggacttttgggtgtccaagcatgacttttgg

SEQ ID NO: 2542 - RNA, 31 nt, synthetic construct
  source 1..31: mol_type = other RNA
cttttaggtgtccaagcaccccttttggagg

SEQ ID NO: 2543 - RNA, 41 nt, synthetic construct
  source 1..41: mol_type = other RNA
acttttgggtgttcaagcaccacttttggaggaagatttcg

SEQ ID NO: 2544 - RNA, 41 nt, synthetic construct
  source 1..41: mol_type = other RNA
ttgggtgtccaagcactccttgcggaggtagatttcgctcc

SEQ ID NO: 2545 - RNA, 41 nt, synthetic construct
  source 1..41: mol_type = other RNA
acttttgggtgtccaagcaccacttatggagggagatttcg

SEQ ID NO: 2546 - RNA, 31 nt, synthetic construct
  source 1..31: mol_type = other RNA
ggtgtccaagtgcgctatttggagggagatt

SEQ ID NO: 2547 - RNA, 42 nt, synthetic construct
  source 1..42: mol_type = other RNA
acttttgggtggtccaagcacgcaacttggaactagatttcg

SEQ ID NO: 2548 - RNA, 34 nt, synthetic construct
  source 1..34: mol_type = other RNA
ggacttttgggtgtccaagcgacccaccttttgg

SEQ ID NO: 2549 - RNA, 31 nt, synthetic construct
  source 1..31: mol_type = other RNA
ggactttttggtatccaagctccacttttgg

SEQ ID NO: 2550 - RNA, 41 nt, synthetic construct
  source 1..41: mol_type = other RNA
acttttggatctccatgcagcaattttggagggagatttcg

SEQ ID NO: 2551 - RNA, 32 nt, synthetic construct
  source 1..32: mol_type = other RNA
ggtgtccaagcaccacttagaggagggagatt

SEQ ID NO: 2552 - RNA, 31 nt, synthetic construct
  source 1..31: mol_type = other RNA
ggtgttcaagcacaacttttggggggagatt

SEQ ID NO: 2553 - RNA, 31 nt, synthetic construct
  source 1..31: mol_type = other RNA
ggtgtccaagcacacattttggcgggagatt

SEQ ID NO: 2554 - RNA, 31 nt, synthetic construct
  source 1..31: mol_type = other RNA
ggacttttaggtgtccaagctgcccttttgg

SEQ ID NO: 2555 - RNA, 31 nt, synthetic construct
  source 1..31: mol_type = other RNA
ggacttttaggtgtccaaacaccacatttgg

SEQ ID NO: 2556 - RNA, 31 nt, synthetic construct
  source 1..31: mol_type = other RNA
ggtggagctttaggtgtccaagcaccacttt

SEQ ID NO: 2557 - RNA, 31 nt, synthetic construct
  source 1..31: mol_type = other RNA
ggtgtccaagcaccatttttggagggagatt

SEQ ID NO: 2558 - RNA, 31 nt, synthetic construct
  source 1..31: mol_type = other RNA
cttttggctgtccaagcacacattttggagg

SEQ ID NO: 2559 - RNA, 31 nt, synthetic construct
  source 1..31: mol_type = other RNA
ggtgtccaagcgaccgttttggggggagatt

SEQ ID NO: 2560 - RNA, 41 nt, synthetic construct
  source 1..41: mol_type = other RNA
acttttgggtgtccaagcaccacttttggacggagatttcg

SEQ ID NO: 2561 - RNA, 41 nt, synthetic construct
  source 1..41: mol_type = other RNA
acttttgggtgtccaagcactgcttttgaggggagatttcg

SEQ ID NO: 2562 - RNA, 41 nt, synthetic construct
  source 1..41: mol_type = other RNA
ttgggtgttcaagcacaacttttggggggagatttcgctcc

SEQ ID NO: 2563 - RNA, 30 nt, synthetic construct
  source 1..30: mol_type = other RNA
ggacttttgggtgtccaaggccacttttgg

SEQ ID NO: 2564 - RNA, 31 nt, synthetic construct
  source 1..31: mol_type = other RNA
ggtggacttttaggtatccaaggaaaacttt

SEQ ID NO: 2565 - RNA, 31 nt, synthetic construct
  source 1..31: mol_type = other RNA
cttttcggtgtccaagcaccacttctggagg

SEQ ID NO: 2566 - RNA, 31 nt, synthetic construct
  source 1..31: mol_type = other RNA
ggactttttggtgtccaagcgccacttttgg

SEQ ID NO: 2567 - RNA, 31 nt, synthetic construct
  source 1..31: mol_type = other RNA
ggtggacttttatgtgtccaagcgtcacttt

SEQ ID NO: 2568 - RNA, 31 nt, synthetic construct
  source 1..31: mol_type = other RNA
cttttgggtgtccaagcaccatttttggagg

SEQ ID NO: 2569 - RNA, 31 nt, synthetic construct
  source 1..31: mol_type = other RNA
ggacttttaggtgtccaagcaccacatttgg

SEQ ID NO: 2570 - RNA, 41 nt, synthetic construct
  source 1..41: mol_type = other RNA
aggtggactcctgggtgatcaagcaccgcttttggagggag

SEQ ID NO: 2571 - RNA, 41 nt, synthetic construct
  source 1..41: mol_type = other RNA
aacatagtgtttaggtggacttttgggtgtccaagcaccac

SEQ ID NO: 2572 - RNA, 53 nt, synthetic construct
  source 1..53: mol_type = other RNA
aacatagtgggaggccagaccaggtgttacacttttgggtgtccaagcaccac

SEQ ID NO: 2573 - RNA, 41 nt, synthetic construct
  source 1..41: mol_type = other RNA
acttttgggtgtccaagcaccatttttggagggagatttcg

SEQ ID NO: 2574 - RNA, 34 nt, synthetic construct
  source 1..34: mol_type = other RNA
ggacttttgggtggtccaagcacgcaacttttgg

SEQ ID NO: 2575 - RNA, 31 nt, synthetic construct
  source 1..31: mol_type = other RNA
ggtggacttttgggatgtccaagcccacttt

SEQ ID NO: 2576 - RNA, 31 nt, synthetic construct
  source 1..31: mol_type = other RNA
ggacttttaggtgtccaagcaccacttttgg

SEQ ID NO: 2577 - RNA, 41 nt, synthetic construct
  source 1..41: mol_type = other RNA
acttttggatgtccaagcacaggttttgcagttagatttcg

SEQ ID NO: 2578 - RNA, 31 nt, synthetic construct
  source 1..31: mol_type = other RNA
cttttgggtgttcaagcacaacacttggagg

SEQ ID NO: 2579 - RNA, 41 nt, synthetic construct
  source 1..41: mol_type = other RNA
ttgggtgtccaagaaccaattctcgagggggatttcgctcc

SEQ ID NO: 2580 - RNA, 31 nt, synthetic construct
  source 1..31: mol_type = other RNA
ggacttttcggtgtccaagcgccacttttgg

SEQ ID NO: 2581 - RNA, 31 nt, synthetic construct
  source 1..31: mol_type = other RNA
ggtggattgttggctgtccaagcaccacttt

SEQ ID NO: 2582 - RNA, 31 nt, synthetic construct
  source 1..31: mol_type = other RNA
cttttatgtgtccaagcgtccctttgggagg

SEQ ID NO: 2583 - RNA, 31 nt, synthetic construct
  source 1..31: mol_type = other RNA
ggacttttggatgtccaagctccatttttgg

SEQ ID NO: 2584 - RNA, 42 nt, synthetic construct
  source 1..42: mol_type = other RNA
gtgttcaggtggaacttttgggtgtcccagcaccacttttgg

SEQ ID NO: 2585 - RNA, 41 nt, synthetic construct
  source 1..41: mol_type = other RNA
ttgggtgtccaagcacccgacttgtagggagctttcgctcc

SEQ ID NO: 2586 - RNA, 41 nt, synthetic construct
  source 1..41: mol_type = other RNA
aggtggactcctgggtgagcaagcaccacttttggagggag

SEQ ID NO: 2587 - RNA, 42 nt, synthetic construct
  source 1..42: mol_type = other RNA
ttgggtgtccaagcacatcttttggacggaatatttcgctcc

SEQ ID NO: 2588 - RNA, 31 nt, synthetic construct
  source 1..31: mol_type = other RNA
cttttgggtgttcaagcatactttttggagg

SEQ ID NO: 2589 - RNA, 31 nt, synthetic construct
  source 1..31: mol_type = other RNA
ggtgtccaagcgccacttttggaaggagatt

SEQ ID NO: 2590 - RNA, 31 nt, synthetic construct
  source 1..31: mol_type = other RNA
ggtggaattttcggtgtccaagcgccacttt

SEQ ID NO: 2591 - RNA, 31 nt, synthetic construct
  source 1..31: mol_type = other RNA
cttttgggtgttcaagcacacgttttggagg

SEQ ID NO: 2592 - RNA, 41 nt, synthetic construct
  source 1..41: mol_type = other RNA
acttttgggtgcccaacccccacttttggagggagatttcg

SEQ ID NO: 2593 - RNA, 31 nt, synthetic construct
  source 1..31: mol_type = other RNA
ggactcatgggcgtccaagcaccacttttgg

SEQ ID NO: 2594 - RNA, 41 nt, synthetic construct
  source 1..41: mol_type = other RNA
ttgggtgtccaagcaccacttttggagggagttttcgctcc

SEQ ID NO: 2595 - RNA, 31 nt, synthetic construct
  source 1..31: mol_type = other RNA
ggacttctgggtgtccaagcactgcttttgg

SEQ ID NO: 2596 - RNA, 33 nt, synthetic construct
  source 1..33: mol_type = other RNA
cttttgggtgttcaagcattagtactttggagg

SEQ ID NO: 2597 - RNA, 31 nt, synthetic construct
  source 1..31: mol_type = other RNA
cttttgggtgttcaagcaacggttttggagg

SEQ ID NO: 2598 - RNA, 31 nt, synthetic construct
  source 1..31: mol_type = other RNA
ggtgtccaagcaccacttatggaggaagatt

SEQ ID NO: 2599 - RNA, 31 nt, synthetic construct
  source 1..31: mol_type = other RNA
ggtggacttttgggtgtcccagcaccacttt

SEQ ID NO: 2600 - RNA, 31 nt, synthetic construct
  source 1..31: mol_type = other RNA
ggacttttgggtgtccaagcaccatttttgg

SEQ ID NO: 2601 - RNA, 41 nt, synthetic construct
  source 1..41: mol_type = other RNA
acttttgggtgtccaagcaccacttctggagggagatttcg

SEQ ID NO: 2602 - RNA, 42 nt, synthetic construct
  source 1..42: mol_type = other RNA
ggtgtccaagcacgccaaaaataccactttgggagggagatt

SEQ ID NO: 2603 - RNA, 31 nt, synthetic construct
  source 1..31: mol_type = other RNA
ggacttgttggtatccaagcaccgcttttgg

SEQ ID NO: 2604 - RNA, 41 nt, synthetic construct
  source 1..41: mol_type = other RNA
ttgggtgtccaagcacaactcttggagtaatatttcgctcc

SEQ ID NO: 2605 - RNA, 31 nt, synthetic construct
  source 1..31: mol_type = other RNA
cttttgggtggccaagcatacgcattggagg

SEQ ID NO: 2606 - RNA, 31 nt, synthetic construct
  source 1..31: mol_type = other RNA
ggtgtccaagcactccttgcggaggtagatt

SEQ ID NO: 2607 - RNA, 41 nt, synthetic construct
  source 1..41: mol_type = other RNA
gtgttcaggttaactcctgggtgatcaagcaccacttttgg

SEQ ID NO: 2608 - RNA, 33 nt, synthetic construct
  source 1..33: mol_type = other RNA
ggtgtccaagcatgacttccttggtgggagatt

SEQ ID NO: 2609 - RNA, 42 nt, synthetic construct
  source 1..42: mol_type = other RNA
ttgggtgtccaagcaccatcggatggagggcgatttcgctcc

SEQ ID NO: 2610 - RNA, 31 nt, synthetic construct
  source 1..31: mol_type = other RNA
cttttgggtgttcaaccatcactcttggagg

SEQ ID NO: 2611 - RNA, 31 nt, synthetic construct
  source 1..31: mol_type = other RNA
ggactttagggtgtccaagaaccaattttgg

SEQ ID NO: 2612 - RNA, 31 nt, synthetic construct
  source 1..31: mol_type = other RNA
ggtggacttttgggtgtccaagcattacttt

SEQ ID NO: 2613 - RNA, 31 nt, synthetic construct
  source 1..31: mol_type = other RNA
cttttgggttgccaagcaccacttatggagg

SEQ ID NO: 2614 - RNA, 41 nt, synthetic construct
  source 1..41: mol_type = other RNA
ttgggtgttcaagcatactttttggaggaaggtttcgctcc

SEQ ID NO: 2615 - RNA, 31 nt, synthetic construct
  source 1..31: mol_type = other RNA
ggacttttgggtgtccaagcactgcttttgg

SEQ ID NO: 2616 - RNA, 41 nt, synthetic construct
  source 1..41: mol_type = other RNA
aacatagtgttcggggggacttttgggggtccgagcaccac

SEQ ID NO: 2617 - RNA, 32 nt, synthetic construct
  source 1..32: mol_type = other RNA
tgttcaggtggaacttttgggtgtcccagcac

SEQ ID NO: 2618 - RNA, 28 nt, synthetic construct
  source 1..28: mol_type = other RNA
cttttgggatgtccaagcccattggagg

SEQ ID NO: 2619 - RNA, 30 nt, synthetic construct
  source 1..30: mol_type = other RNA
ggactttggggtgttcaagcaccactttgg

SEQ ID NO: 2620 - RNA, 31 nt, synthetic construct
  source 1..31: mol_type = other RNA
ggtggacttttgagtgtccaaccaccacttt

SEQ ID NO: 2621 - RNA, 31 nt, synthetic construct
  source 1..31: mol_type = other RNA
cttttgggtgtcccagcaccacttatggagg

SEQ ID NO: 2622 - RNA, 31 nt, synthetic construct
  source 1..31: mol_type = other RNA
cttttgggtgtccaagcactccttgcggagg

SEQ ID NO: 2623 - RNA, 34 nt, synthetic construct
  source 1..34: mol_type = other RNA
ggtggtacacttttgggtgtccaagactcacttt

SEQ ID NO: 2624 - RNA, 30 nt, synthetic construct
  source 1..30: mol_type = other RNA
cttttaggtgtccaagcaccactttggagg

SEQ ID NO: 2625 - RNA, 41 nt, synthetic construct
  source 1..41: mol_type = other RNA
ttgggtgttcaagcacaacacttgtagggagttttcgctcc

SEQ ID NO: 2626 - RNA, 31 nt, synthetic construct
  source 1..31: mol_type = other RNA
ggacttttgggaatccaagcaccccttttgg

SEQ ID NO: 2627 - RNA, 31 nt, synthetic construct
  source 1..31: mol_type = other RNA
tgttcacgtggacttttgcgtgttccagcac

SEQ ID NO: 2628 - RNA, 31 nt, synthetic construct
  source 1..31: mol_type = other RNA
ggtgtccaagcacaactcttggagtaagatt

SEQ ID NO: 2629 - RNA, 41 nt, synthetic construct
  source 1..41: mol_type = other RNA
ttgggtgtccaagtatcacttttggagtgaactttcgctcc

SEQ ID NO: 2630 - RNA, 27 nt, synthetic construct
  source 1..27: mol_type = other RNA
tgttcaggtggactgggttccaagcac

SEQ ID NO: 2631 - RNA, 31 nt, synthetic construct
  source 1..31: mol_type = other RNA
cttttgggtgttcaagcacccgtcttggagg

SEQ ID NO: 2632 - RNA, 31 nt, synthetic construct
  source 1..31: mol_type = other RNA
ggtggacttttgggtgttcaagcaccacttt

SEQ ID NO: 2633 - RNA, 31 nt, synthetic construct
  source 1..31: mol_type = other RNA
ggtggatgcctaggtgatcgagcaccacttt

SEQ ID NO: 2634 - RNA, 31 nt, synthetic construct
  source 1..31: mol_type = other RNA
ggtggacttttaggtggccaagcgacacttt

SEQ ID NO: 2635 - RNA, 31 nt, synthetic construct
  source 1..31: mol_type = other RNA
ggtgttcaagcaccacttgaggagggagatt

SEQ ID NO: 2636 - RNA, 42 nt, synthetic construct
  source 1..42: mol_type = other RNA
ggactcttgggtgtccaagcacgccaaaaataccacttttgg

SEQ ID NO: 2637 - RNA, 41 nt, synthetic construct
  source 1..41: mol_type = other RNA
ttgggtgtccaagcacaggttttgcagttatatttcgctcc

SEQ ID NO: 2638 - RNA, 31 nt, synthetic construct
  source 1..31: mol_type = other RNA
ggacttttgggtgtccaagcaccacatttgg

SEQ ID NO: 2639 - RNA, 41 nt, synthetic construct
  source 1..41: mol_type = other RNA
acttttgggggtccgagcaccgcttttggagggagatttcg

SEQ ID NO: 2640 - RNA, 31 nt, synthetic construct
  source 1..31: mol_type = other RNA
ggtgtccaagcaatcattgcggaggtagatt

SEQ ID NO: 2641 - RNA, 41 nt, synthetic construct
  source 1..41: mol_type = other RNA
aacatagtattccggttaactcctgggtgatcaagcaccac

SEQ ID NO: 2642 - RNA, 41 nt, synthetic construct
  source 1..41: mol_type = other RNA
acttttgggtgttcaagcaccacttgaggagggagatttcg

SEQ ID NO: 2643 - RNA, 31 nt, synthetic construct
  source 1..31: mol_type = other RNA
ggactttgtggtgtccaagcgtcacttttgg

SEQ ID NO: 2644 - RNA, 31 nt, synthetic construct
  source 1..31: mol_type = other RNA
ggacttttgggcgtccaaacaccagttttgg

SEQ ID NO: 2645 - RNA, 31 nt, synthetic construct
  source 1..31: mol_type = other RNA
ggtgtccaagcaccacttttggagggagatt

SEQ ID NO: 2646 - RNA, 31 nt, synthetic construct
  source 1..31: mol_type = other RNA
ggtgggcttttgggtgtccaagcacaacttt

SEQ ID NO: 2647 - RNA, 31 nt, synthetic construct
  source 1..31: mol_type = other RNA
ggtgtccaagcaccgcttttggagggagatt

SEQ ID NO: 2648 - RNA, 31 nt, synthetic construct
  source 1..31: mol_type = other RNA
ggacttttgggtgttcaagcacacgttttgg

SEQ ID NO: 2649 - RNA, 32 nt, synthetic construct
  source 1..32: mol_type = other RNA
cttttgggtggtccaagcaccacttttggagg

SEQ ID NO: 2650 - RNA, 31 nt, synthetic construct
  source 1..31: mol_type = other RNA
cttttaggtgtccaagcgccacttttggagg

SEQ ID NO: 2651 - RNA, 31 nt, synthetic construct
  source 1..31: mol_type = other RNA
ggacttttggatgtccaagcacaggttttgg

SEQ ID NO: 2652 - RNA, 41 nt, synthetic construct
  source 1..41: mol_type = other RNA
acttttgggtgtccaagcatcatttttggagggagatttcg

SEQ ID NO: 2653 - RNA, 40 nt, synthetic construct
  source 1..40: mol_type = other RNA
ttgggtgtccaagcaccacatttgagggagatttcgctcc

SEQ ID NO: 2654 - RNA, 31 nt, synthetic construct
  source 1..31: mol_type = other RNA
cttttggctgtccgagcacaacttgtggagg

SEQ ID NO: 2655 - RNA, 42 nt, synthetic construct
  source 1..42: mol_type = other RNA
acttttgggtgtccaagcaccacttagaggagggagatttcg

SEQ ID NO: 2656 - RNA, 31 nt, synthetic construct
  source 1..31: mol_type = other RNA
cttttggctgtccaagcaccacttttggagg

SEQ ID NO: 2657 - RNA, 30 nt, synthetic construct
  source 1..30: mol_type = other RNA
ggtggactgggttccacagtgcaaaacttt

SEQ ID NO: 2658 - RNA, 34 nt, synthetic construct
  source 1..34: mol_type = other RNA
ggacttttgggtgttcaagcattagtacttttgg

SEQ ID NO: 2659 - RNA, 31 nt, synthetic construct
  source 1..31: mol_type = other RNA
ggactgttggctgtccaagcaccacttttgg

SEQ ID NO: 2660 - RNA, 41 nt, synthetic construct
  source 1..41: mol_type = other RNA
acttttgggtgtcccagcaccacttatggagggagatttcg

SEQ ID NO: 2661 - RNA, 31 nt, synthetic construct
  source 1..31: mol_type = other RNA
cttttgggtgttcaagcaccacttgaggagg

SEQ ID NO: 2662 - RNA, 31 nt, synthetic construct
  source 1..31: mol_type = other RNA
ggacttttgggtgtccaagcaccgcttttgg

SEQ ID NO: 2663 - RNA, 41 nt, synthetic construct
  source 1..41: mol_type = other RNA
ttgggtgttcaagcacacgttttggggggaggtttcgctcc

SEQ ID NO: 2664 - RNA, 31 nt, synthetic construct
  source 1..31: mol_type = other RNA
ggtggacttttgggtgttcaagcacaacttt

SEQ ID NO: 2665 - RNA, 31 nt, synthetic construct
  source 1..31: mol_type = other RNA
ggtgggcttttaggtggccaagcgccacttt

SEQ ID NO: 2666 - RNA, 41 nt, synthetic construct
  source 1..41: mol_type = other RNA
acttttgggtgtccaagcactgcttgtggaggtagatttcg

SEQ ID NO: 2667 - RNA, 30 nt, synthetic construct
  source 1..30: mol_type = other RNA
ggtggaactttgggtgttcaagcatacttt

SEQ ID NO: 2668 - RNA, 31 nt, synthetic construct
  source 1..31: mol_type = other RNA
ggtggacttttgggttgccaagcaccacttt

SEQ ID NO: 2669 - RNA, 41 nt, synthetic construct
  source 1..41: mol_type = other RNA
ttgggtgtccaagcaccatttttggagggacatttcgctcc

SEQ ID NO: 2670 - RNA, 41 nt, synthetic construct
  source 1..41: mol_type = other RNA
ttgggtgtccaagcactgcttgtggaggtagatttcgctcc

SEQ ID NO: 2671 - RNA, 41 nt, synthetic construct
  source 1..41: mol_type = other RNA
aggtggactttaggtagtccacgcacaatttttggagggag

SEQ ID NO: 2672 - RNA, 42 nt, synthetic construct
  source 1..42: mol_type = other RNA
ggtgtccaaacaccacaccaaaaataccattggcgggagatt

SEQ ID NO: 2673 - RNA, 41 nt, synthetic construct
  source 1..41: mol_type = other RNA
ttgggtgtccacgcacaatttttagagggagatttcgctcc

SEQ ID NO: 2674 - RNA, 31 nt, synthetic construct
  source 1..31: mol_type = other RNA
ggtggtcttgttgggtggccaagcatacttt

SEQ ID NO: 2675 - RNA, 31 nt, synthetic construct
  source 1..31: mol_type = other RNA
ggactttcgggtgttcaagcacccgttttgg

SEQ ID NO: 2676 - RNA, 41 nt, synthetic construct
  source 1..41: mol_type = other RNA
acttttgggtgatcaagcaccgcttttggagggagatttcg

SEQ ID NO: 2677 - RNA, 31 nt, synthetic construct
  source 1..31: mol_type = other RNA
cttttgggtgtccaagcactgcttgtggagg

SEQ ID NO: 2678 - RNA, 30 nt, synthetic construct
  source 1..30: mol_type = other RNA
ggtgtccagtgcaactattggagggagatt

SEQ ID NO: 2679 - RNA, 41 nt, synthetic construct
  source 1..41: mol_type = other RNA
acttttgggtgagcaagcaccacttttggagggagatttcg

SEQ ID NO: 2680 - RNA, 37 nt, synthetic construct
  source 1..37: mol_type = other RNA
ttgggtgtccaagcccattggagggagttttcgctcc

SEQ ID NO: 2681 - RNA, 31 nt, synthetic construct
  source 1..31: mol_type = other RNA
ggactgtttggtgtccaagtatcacttttgg

SEQ ID NO: 2682 - RNA, 31 nt, synthetic construct
  source 1..31: mol_type = other RNA
ggacttgtgggtgttcaagcaccacttttgg

SEQ ID NO: 2683 - RNA, 41 nt, synthetic construct
  source 1..41: mol_type = other RNA
ttgggtgtccaagcaccgcttttggagggagacttcgctcc

SEQ ID NO: 2684 - RNA, 33 nt, synthetic construct
  source 1..33: mol_type = other RNA
cttttaggttcgtccaagcaatcattgcggagg

SEQ ID NO: 2685 - RNA, 31 nt, synthetic construct
  source 1..31: mol_type = other RNA
ggacttttgggtgttcaagcacaaattttgg

SEQ ID NO: 2686 - RNA, 32 nt, synthetic construct
  source 1..32: mol_type = other RNA
cttttgggtgtccaagcaccatcggatggagg

SEQ ID NO: 2687 - RNA, 30 nt, synthetic construct
  source 1..30: mol_type = other RNA
ggtggacttttgggtgttcaagcacacttt

SEQ ID NO: 2688 - RNA, 31 nt, synthetic construct
  source 1..31: mol_type = other RNA
ggtgtccaagcaccccttttgtaacgagatt

SEQ ID NO: 2689 - RNA, 31 nt, synthetic construct
  source 1..31: mol_type = other RNA
ggtgtccaagcaccacttctggagggagatt

SEQ ID NO: 2690 - RNA, 31 nt, synthetic construct
  source 1..31: mol_type = other RNA
ggtgttcaagcacaaattttggggggagatt

SEQ ID NO: 2691 - RNA, 31 nt, synthetic construct
  source 1..31: mol_type = other RNA
ggtggattgtttggtgtccaagtatcacttt

SEQ ID NO: 2692 - RNA, 31 nt, synthetic construct
  source 1..31: mol_type = other RNA
ggtggcctttagggtgtccaagaaccacttt

SEQ ID NO: 2693 - RNA, 41 nt, synthetic construct
  source 1..41: mol_type = other RNA
ttgggtgttcaagcaccgcttttggagggagatttcgctcc

SEQ ID NO: 2694 - RNA, 41 nt, synthetic construct
  source 1..41: mol_type = other RNA
ttgggtgtccaagcactgcttttgaggggagatttcgctcc

SEQ ID NO: 2695 - RNA, 41 nt, synthetic construct
  source 1..41: mol_type = other RNA
acttttgggtgtccaagcaccactttggagaggagatttcg

SEQ ID NO: 2696 - RNA, 31 nt, synthetic construct
  source 1..31: mol_type = other RNA
ggtggatttttggatctccatgcagcacttt

SEQ ID NO: 2697 - RNA, 41 nt, synthetic construct
  source 1..41: mol_type = other RNA
ttgggtgtccgagcacaacttgtggcgggagatttcgctcc

SEQ ID NO: 2698 - RNA, 31 nt, synthetic construct
  source 1..31: mol_type = other RNA
ggacttttgggtgttcaagcaccacttttgg

SEQ ID NO: 2699 - RNA, 42 nt, synthetic construct
  source 1..42: mol_type = other RNA
acttttgggtagtccacgcacaatttttagagggagatttcg

SEQ ID NO: 2700 - RNA, 41 nt, synthetic construct
  source 1..41: mol_type = other RNA
gtgttcagctggacttttaggtgtgcgagctacacttttgg

SEQ ID NO: 2701 - RNA, 37 nt, synthetic construct
  source 1..37: mol_type = other RNA
ggacttgagattttggctgtccaagcacacattttgg

SEQ ID NO: 2702 - RNA, 31 nt, synthetic construct
  source 1..31: mol_type = other RNA
ggtgtccaagcaccacttttggacggagatt

SEQ ID NO: 2703 - RNA, 41 nt, synthetic construct
  source 1..41: mol_type = other RNA
acttttgggtgatcgagcaccaattttggagggagatttcg

SEQ ID NO: 2704 - RNA, 31 nt, synthetic construct
  source 1..31: mol_type = other RNA
ggacttttgggtgttcaaccatcacttttgg

SEQ ID NO: 2705 - RNA, 31 nt, synthetic construct
  source 1..31: mol_type = other RNA
ggacttttgggttgccaagcaccacttttgg

SEQ ID NO: 2706 - RNA, 32 nt, synthetic construct
  source 1..32: mol_type = other RNA
ggtgttcaagcaacggttttggagaagagatt

SEQ ID NO: 2707 - RNA, 31 nt, synthetic construct
  source 1..31: mol_type = other RNA
ggtgtccaagcgccacttttggggggagatt

SEQ ID NO: 2708 - RNA, 41 nt, synthetic construct
  source 1..41: mol_type = other RNA
ttgggtgttcaaccatcactcttgtagggaggtttcgctcc

SEQ ID NO: 2709 - RNA, 31 nt, synthetic construct
  source 1..31: mol_type = other RNA
ggactcctgggtgatcaagcaccgcttttgg

SEQ ID NO: 2710 - RNA, 30 nt, synthetic construct
  source 1..30: mol_type = other RNA
ggacttttgggtgttcaagcatacttttgg

SEQ ID NO: 2711 - RNA, 49 nt, synthetic construct
  source 1..49: mol_type = other RNA
acttttgggtgttcaagcacccgtcttcccacccccaagggagatttcg

SEQ ID NO: 2712 - RNA, 31 nt, synthetic construct
  source 1..31: mol_type = other RNA
ggtgtccaagcaccacttatggagggagatt

SEQ ID NO: 2713 - RNA, 31 nt, synthetic construct
  source 1..31: mol_type = other RNA
ggtggacttttgcgtgttccagcgccacttt

SEQ ID NO: 2714 - RNA, 31 nt, synthetic construct
  source 1..31: mol_type = other RNA
ggacttttgggtgttcaagcaacggttttgg

SEQ ID NO: 2715 - RNA, 31 nt, synthetic construct
  source 1..31: mol_type = other RNA
ggtgtccaagcaccactttggagaggagatt

SEQ ID NO: 2716 - RNA, 31 nt, synthetic construct
  source 1..31: mol_type = other RNA
ggacttttgggtgttcaagcacaacttttgg

SEQ ID NO: 2717 - RNA, 31 nt, synthetic construct
  source 1..31: mol_type = other RNA
cttttaggtgatcgagcaccaattttggagg

SEQ ID NO: 2718 - RNA, 43 nt, synthetic construct
  source 1..43: mol_type = other RNA
acttttggaaatgtccgagcaccacgtttggagtgagatttcg

SEQ ID NO: 2719 - RNA, 43 nt, synthetic construct; identical to SEQ ID NO: 2718
  source 1..43: mol_type = other RNA

SEQ ID NO: 2720 - RNA, 31 nt, synthetic construct
  source 1..31: mol_type = other RNA
ggtgtgcgagctaccattttggacggagatt

SEQ ID NO: 2721 - RNA, 41 nt, synthetic construct
  source 1..41: mol_type = other RNA
ttgggtgttcaagcacaaattttggggggagctttcgctcc

SEQ ID NO: 2722 - RNA, 31 nt, synthetic construct
  source 1..31: mol_type = other RNA
ggtgtccaagcaccacttttggagctagatt

SEQ ID NO: 2723 - RNA, 31 nt, synthetic construct
  source 1..31: mol_type = other RNA
cttttgggtgtccaagcaccacatttggagg

SEQ ID NO: 2724 - RNA, 31 nt, synthetic construct
  source 1..31: mol_type = other RNA
ggtggacgtttggcttcccaagaaccacttt

SEQ ID NO: 2725 - RNA, 31 nt, synthetic construct
  source 1..31: mol_type = other RNA
cttttgggtgttcaagcaccacttatggagg

SEQ ID NO: 2726 - RNA, 31 nt, synthetic construct
  source 1..31: mol_type = other RNA
ggtggactttaggtagtccacgcacaacttt

SEQ ID NO: 2727 - RNA, 31 nt, synthetic construct
  source 1..31: mol_type = other RNA
ggtgtccaagcacaggttttgcagttagatt

SEQ ID NO: 2728 - RNA, 31 nt, synthetic construct
  source 1..31: mol_type = other RNA
ggacttttgggtgtccaagactcgtttttgg

SEQ ID NO: 2729 - RNA, 31 nt, synthetic construct
  source 1..31: mol_type = other RNA
ggtgtccacgcacaatttttagagggagatt

SEQ ID NO: 2730 - RNA, 31 nt, synthetic construct
  source 1..31: mol_type = other RNA
ggtgggcttttgggtgtccaagcatgacttt

SEQ ID NO: 2731 - RNA, 31 nt, synthetic construct
  source 1..31: mol_type = other RNA
tgttcggggggacttttgggggtccgagcac

SEQ ID NO: 2732 - RNA, 31 nt, synthetic construct
  source 1..31: mol_type = other RNA
ggtgttcaagcaccacttttggacggagatt

SEQ ID NO: 2733 - RNA, 42 nt, synthetic construct
  source 1..42: mol_type = other RNA
ttgggtgtccaagcaccgtttttggaggcaagatttcgctcc

SEQ ID NO: 2734 - RNA, 29 nt, synthetic construct
  source 1..29: mol_type = other RNA
ggacttttgggatgtccaagcccatttgg

SEQ ID NO: 2735 - RNA, 31 nt, synthetic construct
  source 1..31: mol_type = other RNA
cttttgggtgtccaagcaccacttagggagg

SEQ ID NO: 2736 - RNA, 41 nt, synthetic construct
  source 1..41: mol_type = other RNA
acttttgggtgtccaagcaccacatccggggggagatttcg

SEQ ID NO: 2737 - RNA, 31 nt, synthetic construct
  source 1..31: mol_type = other RNA
ggacttttgggggtccgagcaccgcttttgg

SEQ ID NO: 2738 - RNA, 33 nt, synthetic construct
  source 1..33: mol_type = other RNA
cttttctaaatgtccgagcaccacgtttggagg

SEQ ID NO: 2739 - RNA, 33 nt, synthetic construct; identical to SEQ ID NO: 2738
  source 1..33: mol_type = other RNA

SEQ ID NO: 2740 - RNA, 41 nt, synthetic construct
  source 1..41: mol_type = other RNA
ttgggtgttcaagcaccacttttggaggaagatttcgctcc

SEQ ID NO: 2741 - RNA, 31 nt, synthetic construct
  source 1..31: mol_type = other RNA
cttttgggtgcccaacccccacttttggagg

SEQ ID NO: 2742 - RNA, 41 nt, synthetic construct
  source 1..41: mol_type = other RNA
aggtggactttttggtgtgcgagctaccattttggagggag

SEQ ID NO: 2743 - RNA, 31 nt, synthetic construct
  source 1..31: mol_type = other RNA
ggtgttcaagcacaacacttgtagggagatt

SEQ ID NO: 2744 - RNA, 32 nt, synthetic construct
  source 1..32: mol_type = other RNA
ggactttggggtgttcaagcccaccgatttgg

SEQ ID NO: 2745 - RNA, 43 nt, synthetic construct
  source 1..43: mol_type = other RNA
aacatagtgttgaggtggacttttgcaggtgttccagcaccac

SEQ ID NO: 2746 - RNA, 31 nt, synthetic construct
  source 1..31: mol_type = other RNA
cttttgggtgtccaagcaccacttttggagg

SEQ ID NO: 2747 - RNA, 31 nt, synthetic construct
  source 1..31: mol_type = other RNA
ggtgggcttttgggtgttcaagcattacttt

SEQ ID NO: 2748 - RNA, 31 nt, synthetic construct
  source 1..31: mol_type = other RNA
cttttaggtgtccaagcaccacatttggagg

SEQ ID NO: 2749 - RNA, 30 nt, synthetic construct
  source 1..30: mol_type = other RNA
ggtggaatattaggtgttcaagcacacttt

SEQ ID NO: 2750 - RNA, 40 nt, synthetic construct
  source 1..40: mol_type = other RNA
ttgggtgtccagtgcaactattggagggagatttcgctcc

SEQ ID NO: 2751 - RNA, 41 nt, synthetic construct
  source 1..41: mol_type = other RNA
aacatagtgttcagctggacttttaggtgtgcgagcaccac

SEQ ID NO: 2752 - RNA, 31 nt, synthetic construct
  source 1..31: mol_type = other RNA
cttttgggtgtccaagcaccacatccggagg

SEQ ID NO: 2753 - RNA, 31 nt, synthetic construct
  source 1..31: mol_type = other RNA
ggtgttcaagcacacgttttggggggagatt

SEQ ID NO: 2754 - RNA, 31 nt, synthetic construct
  source 1..31: mol_type = other RNA
ggtggacttttgggtgcccaacccccacttt

SEQ ID NO: 2755 - RNA, 31 nt, synthetic construct
  source 1..31: mol_type = other RNA
cttttggatctccatgcagcaattttggagg

SEQ ID NO: 2756 - RNA, 41 nt, synthetic construct
  source 1..41: mol_type = other RNA
ttgggtgtcccagcaccacttatggagggggatttcgctcc

SEQ ID NO: 2757 - RNA, 31 nt, synthetic construct
  source 1..31: mol_type = other RNA
cttttgggtgtccaagcaccgcttttggagg

SEQ ID NO: 2758 - RNA, 31 nt, synthetic construct
  source 1..31: mol_type = other RNA
ggtgtccaagcacgcaacttggaactagatt

SEQ ID NO: 2759 - RNA, 37 nt, synthetic construct
  source 1..37: mol_type = other RNA
tgttcaggtggacttgaggttttggctgtccgagcac

SEQ ID NO: 2760 - RNA, 41 nt, synthetic construct
  source 1..41: mol_type = other RNA
ttgggtgttcaagcaccacttatggaggggggtttcgctcc

SEQ ID NO: 2761 - RNA, 47 nt, synthetic construct
  source 1..47: mol_type = other RNA
gtgttcaggtggacttgaggttttggctgtccgagcacaacttttgg

SEQ ID NO: 2762 - RNA, 31 nt, synthetic construct
  source 1..31: mol_type = other RNA
ggtggacttttaggtgtccaggtaccacttt

SEQ ID NO: 2763 - RNA, 41 nt, synthetic construct
  source 1..41: mol_type = other RNA
ttgggtgttcaagcaccacttttggacggaagtttcgctcc

SEQ ID NO: 2764 - RNA, 33 nt, synthetic construct
  source 1..33: mol_type = other RNA
tgttcaggtggacttttgcaggtgttccagcac

SEQ ID NO: 2765 - RNA, 31 nt, synthetic construct
  source 1..31: mol_type = other RNA
ggacttttgggtgtccaagcaccacttttgg

SEQ ID NO: 2766 - RNA, 42 nt, synthetic construct
  source 1..42: mol_type = other RNA
acttttgggtgtccaagcaccacatttgagagggagatttcg

SEQ ID NO: 2767 - RNA, 41 nt, synthetic construct
  source 1..41: mol_type = other RNA
ttgggtgttcaagcaacggttttggagaagagcttcgctcc

SEQ ID NO: 2768 - RNA, 31 nt, synthetic construct
  source 1..31: mol_type = other RNA
cttttgggtgttcaagcaccacttttggagg

SEQ ID NO: 2769 - RNA, 31 nt, synthetic construct
  source 1..31: mol_type = other RNA
ggtgtccaaggacctcttttggaacgagatt

SEQ ID NO: 2770 - RNA, 43 nt, synthetic construct
  source 1..43: mol_type = other RNA
tgttcgggcgtgttggccaagggatttctaaatgtccgagcac

SEQ ID NO: 2771 - RNA, 43 nt, synthetic construct; identical to SEQ ID NO: 2770
  source 1..43: mol_type = other RNA

SEQ ID NO: 2772 - RNA, 31 nt, synthetic construct
  source 1..31: mol_type = other RNA
tgttccggttaactcctgggtgatcaagcac

SEQ ID NO: 2773 - RNA, 31 nt, synthetic construct
  source 1..31: mol_type = other RNA
ggacttttggatctccatgcagcaattttgg

SEQ ID NO: 2774 - RNA, 31 nt, synthetic construct
  source 1..31: mol_type = other RNA
ggtgtccatgcagcaattttggagggagatt

SEQ ID NO: 2775 - RNA, 31 nt, synthetic construct
  source 1..31: mol_type = other RNA
cttttggcttcccaagaacccattttggagg

SEQ ID NO: 2776 - RNA, 31 nt, synthetic construct
  source 1..31: mol_type = other RNA
ggtggccttttgggtgttcaaccatcacttt

SEQ ID NO: 2777 - RNA, 42 nt, synthetic construct
  source 1..42: mol_type = other RNA
gtgttcaggttggactcctgggtgagcaagcaccacttttgg

SEQ ID NO: 2778 - RNA, 33 nt, synthetic construct
  source 1..33: mol_type = other RNA
ggtggacttctaggttcgtccaagcaatacttt

SEQ ID NO: 2779 - RNA, 42 nt, synthetic construct
  source 1..42: mol_type = other RNA
ttgggtgtccaagcaccacatttgagagggcgatttcgctcc

SEQ ID NO: 2780 - RNA, 31 nt, synthetic construct
  source 1..31: mol_type = other RNA
ggtgttcaagcatactttttggaggaagatt

SEQ ID NO: 2781 - RNA, 30 nt, synthetic construct
  source 1..30: mol_type = other RNA
ggtggatttgcacgtgtactgccaaacttt

SEQ ID NO: 2782 - RNA, 31 nt, synthetic construct
  source 1..31: mol_type = other RNA
ggacttttaggtggccaagcgccacttttgg

SEQ ID NO: 2783 - RNA, 31 nt, synthetic construct
  source 1..31: mol_type = other RNA
cttttggtagtccacgcacaatttttggagg

SEQ ID NO: 2784 - RNA, 41 nt, synthetic construct
  source 1..41: mol_type = other RNA
ttgggtgtccatgcagcaattttggagggtgacttcgctcc

SEQ ID NO: 2785 - RNA, 41 nt, synthetic construct
  source 1..41: mol_type = other RNA
ttgggtgtccaagcaccacttttggacggacgtttcgctcc

SEQ ID NO: 2786 - RNA, 41 nt, synthetic construct
  source 1..41: mol_type = other RNA
aacatagtcacaggtggaacttttgggtgtcccagcaccac

SEQ ID NO: 2787 - RNA, 42 nt, synthetic construct
  source 1..42: mol_type = other RNA
ttgggtgtccaagcaccacttagaggagggagaattcgctcc

SEQ ID NO: 2788 - RNA, 48 nt, synthetic construct
  source 1..48: mol_type = other RNA
aggtggactttgcacgtgtactgccaaacggtctgcctttggagggag

SEQ ID NO: 2789 - RNA, 31 nt, synthetic construct
  source 1..31: mol_type = other RNA
cttttgggtgatcaagcaccgcttttggagg

SEQ ID NO: 2790 - RNA, 31 nt, synthetic construct
  source 1..31: mol_type = other RNA
ggtggactcctgggtgatcaagcaccacttt

SEQ ID NO: 2791 - RNA, 32 nt, synthetic construct
  source 1..32: mol_type = other RNA
tgttcgggttggactcctgggtgagcaagcac

SEQ ID NO: 2792 - RNA, 33 nt, synthetic construct
  source 1..33: mol_type = other RNA
ggtgttcaagcattagtactttggtgggagatt

SEQ ID NO: 2793 - RNA, 31 nt, synthetic construct
  source 1..31: mol_type = other RNA
ggtgggatattgggtgttcaagcacaacttt

SEQ ID NO: 2794 - RNA, 31 nt, synthetic construct
  source 1..31: mol_type = other RNA
ggacttttaggtgtccaggtaccacttttgg

SEQ ID NO: 2795 - RNA, 30 nt, synthetic construct
  source 1..30: mol_type = other RNA
ggtgttcaagcccaccgattggatcagatt

SEQ ID NO: 2796 - RNA, 41 nt, synthetic construct
  source 1..41: mol_type = other RNA
ttgggtgtccaagcgccacttttggaaggaaatttcgctcc

SEQ ID NO: 2797 - RNA, 37 nt, synthetic construct
  source 1..37: mol_type = other RNA
ggacttgaggttttggctgtccgagcacaacttttgg

SEQ ID NO: 2798 - RNA, 28 nt, synthetic construct
  source 1..28: mol_type = other RNA
ggactattaggtgttcaagcacttttgg

SEQ ID NO: 2799 - RNA, 42 nt, synthetic construct
  source 1..42: mol_type = other RNA
ttgggtgttcaagcaccacttgaggagggttgagttcgctcc

SEQ ID NO: 2800 - RNA, 41 nt, synthetic construct
  source 1..41: mol_type = other RNA
ggtgtccacagtgcaaatagatcgcattttggcgggagatt

SEQ ID NO: 2801 - RNA, 41 nt, synthetic construct
  source 1..41: mol_type = other RNA
gtgttcaggtcgatgcctaggtgatcgagcaccacttttgg

SEQ ID NO: 2802 - RNA, 41 nt, synthetic construct
  source 1..41: mol_type = other RNA
ttgggtgtccaagcaccactcttgaaggggactttcgctcc

SEQ ID NO: 2803 - RNA, 31 nt, synthetic construct
  source 1..31: mol_type = other RNA
tgttccattggccttgttggtatccaagcac

SEQ ID NO: 2804 - RNA, 41 nt, synthetic construct
  source 1..41: mol_type = other RNA
gtgttcagggggacttttgggggtccgagcaccacttttgg

SEQ ID NO: 2805 - RNA, 41 nt, synthetic construct
  source 1..41: mol_type = other RNA
ttgggtgttcgagcaccaattttggagggaatgttcgctcc

SEQ ID NO: 2806 - RNA, 41 nt, synthetic construct
  source 1..41: mol_type = other RNA
ttgggtgttcaagcacttttgtaggcacagagtttcgctcc

SEQ ID NO: 2807 - RNA, 40 nt, synthetic construct
  source 1..40: mol_type = other RNA
ttgggtgttcaagcccaccgattggatcaggtttcgctcc

SEQ ID NO: 2808 - RNA, 42 nt, synthetic construct
  source 1..42: mol_type = other RNA
ttgggtgtcccaagaacccattttcgaggatgttttcgctcc

SEQ ID NO: 2809 - RNA, 41 nt, synthetic construct
  source 1..41: mol_type = other RNA
acttttggctgtccgagcacaacttgtggcgggagatttcg

SEQ ID NO: 2810 - RNA, 31 nt, synthetic construct
  source 1..31: mol_type = other RNA
ggactttttggtggccaagcgaccgttttgg

SEQ ID NO: 2811 - RNA, 31 nt, synthetic construct
  source 1..31: mol_type = other RNA
tgttccggtcgatgcctaggtgatcgagcac

SEQ ID NO: 2812 - RNA, 31 nt, synthetic construct
  source 1..31: mol_type = other RNA
ggactcctaggtgatcgagcaccaattttgg

SEQ ID NO: 2813 - RNA, 32 nt, synthetic construct
  source 1..32: mol_type = other RNA
ggtgttcaagcacttttgtaggcacagagatt

SEQ ID NO: 2814 - RNA, 41 nt, synthetic construct
  source 1..41: mol_type = other RNA
acttttggcttcccaagaacccattttcgaggaagatttcg

SEQ ID NO: 2815 - RNA, 41 nt, synthetic construct
  source 1..41: mol_type = other RNA
aggtggacttttgggtgtcccagcaccacttatggagggag

SEQ ID NO: 2816 - RNA, 50 nt, synthetic construct
  source 1..50: mol_type = other RNA
ttgggtgttcaagcacccgtcttcccacccccaaggggtgatttcgctcc

SEQ ID NO: 2817 - RNA, 41 nt, synthetic construct
  source 1..41: mol_type = other RNA
ttgggtgtccgagcaccgcttttggagggtgatttcgctcc

SEQ ID NO: 2818 - RNA, 45 nt, synthetic construct
  source 1..45: mol_type = other RNA
gtgttcaggagtcttggatttgctcgtgtactgccaaacttttgg

SEQ ID NO: 2819 - RNA, 33 nt, synthetic construct
  source 1..33: mol_type = other RNA
ggtggggatttctaaatgtccgagcaccacttt

SEQ ID NO: 2820 - RNA, 33 nt, synthetic construct; identical to SEQ ID NO: 2819
  source 1..33: mol_type = other RNA

SEQ ID NO: 2821 - RNA, 36 nt, synthetic construct
  source 1..36: mol_type = other RNA
tgttcaggagtcttggatttgctcgtgtactagcac

SEQ ID NO: 2822 - RNA, 40 nt, synthetic construct
  source 1..40: mol_type = other RNA
ttgggtgtccagcgccatttttggggggagatttcgctcc

SEQ ID NO: 2823 - RNA, 31 nt, synthetic construct
  source 1..31: mol_type = other RNA
cttttgggggtccgagcaccgcttttggagg

SEQ ID NO: 2824 - RNA, 31 nt, synthetic construct
  source 1..31: mol_type = other RNA
ggactcctgggtgagcaagcaccacttttgg

SEQ ID NO: 2825 - RNA, 32 nt, synthetic construct
  source 1..32: mol_type = other RNA
ggtgtcccaagaacccattttcgaggaagatt

SEQ ID NO: 2826 - RNA, 37 nt, synthetic construct
  source 1..37: mol_type = other RNA
ggtgtactgccaaacggtctgcctttggagggagatt

SEQ ID NO: 2827 - RNA, 39 nt, synthetic construct
  source 1..39: mol_type = other RNA
ggtgttcaagcacccgtcttcccacccccaagggagatt

SEQ ID NO: 2828 - RNA, 31 nt, synthetic construct
  source 1..31: mol_type = other RNA
ggtgttcgagcaccaattttggagggagatt

SEQ ID NO: 2829 - RNA, 47 nt, synthetic construct
  source 1..47: mol_type = other RNA
aggtggacttgaggttttggctgtccgagcacaacttgtggagggag

SEQ ID NO: 2830 - RNA, 37 nt, synthetic construct
  source 1..37: mol_type = other RNA
ggactgggttccacagtgcaaatagatcgcattttgg

SEQ ID NO: 2831 - RNA, 41 nt, synthetic construct
  source 1..41: mol_type = other RNA
ttgggtgtccaagcaccatttttggaggaaactttcgctcc

SEQ ID NO: 2832 - RNA, 33 nt, synthetic construct
  source 1..33: mol_type = other RNA
ggtgggctttggggtgttcaagcccaccacttt

SEQ ID NO: 2833 - RNA, 31 nt, synthetic construct
  source 1..31: mol_type = other RNA
ggacttttggcttcccaagaacccattttgg

SEQ ID NO: 2834 - RNA, 31 nt, synthetic construct
  source 1..31: mol_type = other RNA
ggtggactcctgggtgagcaagcaccacttt

SEQ ID NO: 2835 - RNA, 37 nt, synthetic construct
  source 1..37: mol_type = other RNA
ggtggacttgaggttttggctgtccgagcacaacttt

SEQ ID NO: 2836 - RNA, 38 nt, synthetic construct
  source 1..38: mol_type = other RNA
cttttcacgtgtactgccaaacggtctgcctttggagg

SEQ ID NO: 2837 - RNA, 30 nt, synthetic construct
  source 1..30: mol_type = other RNA
ggacttttgggtgtcccagcaccactttgg

SEQ ID NO: 2838 - RNA, 31 nt, synthetic construct
  source 1..31: mol_type = other RNA
tgttcagctggacttttaggtgtgcgagcac

SEQ ID NO: 2839 - RNA, 31 nt, synthetic construct
  source 1..31: mol_type = other RNA
ggactttgcacgtgtactgccaaacgtttgg

SEQ ID NO: 2840 - RNA, 31 nt, synthetic construct
  source 1..31: mol_type = other RNA
ggactttaggtagtccacgcacaatttttgg

SEQ ID NO: 2841 - RNA, 59 nt, synthetic construct
  source 1..59: mol_type = other RNA
aacatagtgttcctgcagtgaacccaggagtcttggatttgcacgtgtactagcaccac

SEQ ID NO: 2842 - RNA, 47 nt, synthetic construct
  source 1..47: mol_type = other RNA
ttgggtgtactgccaaacggtctgcctttggagggagatttcgctcc

SEQ ID NO: 2843 - RNA, 31 nt, synthetic construct
  source 1..31: mol_type = other RNA
ggtggactttttggtgtgcgagctacacttt

SEQ ID NO: 2844 - RNA, 31 nt, synthetic construct
  source 1..31: mol_type = other RNA
ggtgtccgagcaccacgtttggagtgagatt

SEQ ID NO: 2845 - RNA, 31 nt, synthetic construct; identical to SEQ ID NO: 2844
  source 1..31: mol_type = other RNA

SEQ ID NO: 2846 - RNA, 31 nt, synthetic construct
  source 1..31: mol_type = other RNA
ggtgtcccagcaccacttatggagggagatt

SEQ ID NO: 2847 - RNA, 41 nt, synthetic construct
  source 1..41: mol_type = other RNA
acttttgggtatccaagcaccgtttttggaggcagatttcg

SEQ ID NO: 2848 - RNA, 41 nt, synthetic construct
  source 1..41: mol_type = other RNA
aggtggacgcctaggtgatcgagcaccaattttggagggag

SEQ ID NO: 2849 - RNA, 51 nt, synthetic construct
  source 1..51: mol_type = other RNA
ttgggtgtccacagtgcaaatagatcgcattttggcgggagatttcgctcc

SEQ ID NO: 2850 - RNA, 33 nt, synthetic construct
  source 1..33: mol_type = other RNA
ggacttttctaaatgtccgagcaccacgtttgg

SEQ ID NO: 2851 - RNA, 33 nt, synthetic construct; identical to SEQ ID NO: 2850
  source 1..33: mol_type = other RNA

SEQ ID NO: 2852 - RNA, 41 nt, synthetic construct
  source 1..41: mol_type = other RNA
ttgggtgtgcgagctaccattttggacggagatttcgctcc

SEQ ID NO: 2853 - RNA, 47 nt, synthetic construct
  source 1..47: mol_type = other RNA
acttttgggtgtactgccaaacggtctgcctttggagggagatttcg

SEQ ID NO: 2854 - RNA, 31 nt, synthetic construct
  source 1..31: mol_type = other RNA
ggtgtccgagcaccgcttttggagggagatt

SEQ ID NO: 2855 - RNA, 50 nt, synthetic construct
  source 1..50: mol_type = other RNA
acttttgggttccacagtgcaaatagatcgcattttggcgggagatttcg

SEQ ID NO: 2856 - RNA, 41 nt, synthetic construct
  source 1..41: mol_type = other RNA
acttttgggtgtgcgagctaccattttggacggagatttcg

SEQ ID NO: 2857 - RNA, 31 nt, synthetic construct
  source 1..31: mol_type = other RNA
ggtggacttttgggggtccgagcaccacttt

SEQ ID NO: 2858 - RNA, 39 nt, synthetic construct
  source 1..39: mol_type = other RNA
cttttggttccacagtgcaaatagatcgcattttggagg

SEQ ID NO: 2859 - RNA, 55 nt, synthetic construct
  source 1..55: mol_type = other RNA
aacatagtgttccagtagggggcgggggttggactcctgggtgagcaagcaccac

SEQ ID NO: 2860 - RNA, 41 nt, synthetic construct
  source 1..41: mol_type = other RNA
ttgggtgtccgagcaccacgtttggagtgaactttcgctcc

SEQ ID NO: 2861 - RNA, 41 nt, synthetic construct; identical to SEQ ID NO: 2860
  source 1..41: mol_type = other RNA

SEQ ID NO: 2862 - RNA, 54 nt, synthetic construct
  source 1..54: mol_type = other RNA
aacatagtgtttcgggcgtgttggccaagggatttctaaatgtccgagcaccac

SEQ ID NO: 2863 - RNA, 54 nt, synthetic construct; identical to SEQ ID NO: 2862
  source 1..54: mol_type = other RNA

SEQ ID NO: 2864 - RNA, 43 nt, synthetic construct
  source 1..43: mol_type = other RNA
aggtggacatttctaaatgtccgagcaccacgtttggagggag

SEQ ID NO: 2865 - RNA, 43 nt, synthetic construct; identical to SEQ ID NO: 2864
  source 1..43: mol_type = other RNA

SEQ ID NO: 2866 - RNA, 31 nt, synthetic construct
  source 1..31: mol_type = other RNA
ggactttttggtgtgcgagctaccattttgg

SEQ ID NO: 2867 - RNA, 53 nt, synthetic construct
  source 1..53: mol_type = other RNA
gtgttcaggcgtgttggccaagggatttctaaatgtccgagcaccacttttgg

SEQ ID NO: 2868 - RNA, 53 nt, synthetic construct; identical to SEQ ID NO: 2867
  source 1..53: mol_type = other RNA

SEQ ID NO: 2869 - RNA, 31 nt, synthetic construct
  source 1..31: mol_type = other RNA
ggtgtccgagcacaacttgtggcgggagatt

SEQ ID NO: 2870 - RNA, 42 nt, synthetic construct
  source 1..42: mol_type = other RNA
aaccaacacggaaagaactccgggcttcttgccacagattcc

SEQ ID NO: 2871 - RNA, 41 nt, synthetic construct
  source 1..41: mol_type = other RNA
aaccaacacggagagaatatccgtgtctttccacagattcc

SEQ ID NO: 2872 - RNA, 41 nt, synthetic construct
  source 1..41: mol_type = other RNA
aaccaacacggagagagcgcaagcttatttccacagattcc

SEQ ID NO: 2873 - RNA, 41 nt, synthetic construct
  source 1..41: mol_type = other RNA
aaccaacacggagagaacgactgcttctttccacagattcc

SEQ ID NO: 2874 - RNA, 41 nt, synthetic construct
  source 1..41: mol_type = other RNA
aaccaacacgggcagaacaccagattctttccacagattcc

SEQ ID NO: 2875 - RNA, 41 nt, synthetic construct
  source 1..41: mol_type = other RNA
aaccaacacggagagaacgccagcttctttccacagattcc

SEQ ID NO: 2876 - RNA, 41 nt, synthetic construct
  source 1..41: mol_type = other RNA
aaccaacacggagagaagaccggcttctttccacagattcc

SEQ ID NO: 2877 - RNA, 41 nt, synthetic construct
  source 1..41: mol_type = other RNA
aaccaacacgaagacaacaccagtgtctttccacagattcc

SEQ ID NO: 2878 - RNA, 41 nt, synthetic construct
  source 1..41: mol_type = other RNA
cacggagagagcgcaagcttatttccacagattcctttcta

SEQ ID NO: 2879 - RNA, 41 nt, synthetic construct
  source 1..41: mol_type = other RNA
aaccaacacggagacaacaccagcgtctttccacagattcc

SEQ ID NO: 2880 - RNA, 41 nt, synthetic construct
  source 1..41: mol_type = other RNA
aaccaacacggagagaacatccgcttgtttccacagattcc

SEQ ID NO: 2881 - RNA, 41 nt, synthetic construct
  source 1..41: mol_type = other RNA
aaccaacacggagagaataaaagcttcttttcacagattcc

SEQ ID NO: 2882 - RNA, 41 nt, synthetic construct
  source 1..41: mol_type = other RNA
cacggagagaacatccgcttgtttccacagattcctttcta

SEQ ID NO: 2883 - RNA, 41 nt, synthetic construct
  source 1..41: mol_type = other RNA
aaccaacacggagagggcacgagcttatttccacagattcc

SEQ ID NO: 2884 - RNA, 41 nt, synthetic construct
  source 1..41: mol_type = other RNA
aaccaacacggcgagaaccccaggttctttccacagattcc

SEQ ID NO: 2885 - RNA, 41 nt, synthetic construct
  source 1..41: mol_type = other RNA
aaccaacatggagagtacatcggcttatatccacagattcc

SEQ ID NO: 2886 - RNA, 41 nt, synthetic construct
  source 1..41: mol_type = other RNA
aaccaacacggagaggaggcaagcttgcttccacagattcc

SEQ ID NO: 2887 - RNA, 41 nt, synthetic construct
  source 1..41: mol_type = other RNA
aaccaacagggagaggacaccagcctctttccacagattcc

SEQ ID NO: 2888 - RNA, 41 nt, synthetic construct
  source 1..41: mol_type = other RNA
aaccaacacggagacaacaccagcggctttccacagattcc

SEQ ID NO: 2889 - RNA, 41 nt, synthetic construct
  source 1..41: mol_type = other RNA
aaccaacacggagagaccattagcttctttccacagattcc

SEQ ID NO: 2890 - RNA, 41 nt, synthetic construct
  source 1..41: mol_type = other RNA
aaccaacacggcaagaacacaagcttgttcccacagattcc

SEQ ID NO: 2891 - RNA, 41 nt, synthetic construct
  source 1..41: mol_type = other RNA
aaccaacacggagagaacgactgcttcttttcacagattcc

SEQ ID NO: 2892 - RNA, 41 nt, synthetic construct
  source 1..41: mol_type = other RNA
aaccaacacggaaagaacaccagtttctttccacagattcc

SEQ ID NO: 2893 - RNA, 40 nt, synthetic construct
  source 1..40: mol_type = other RNA
aaccaacacggtgagaacttagcttctttccacagattcc

SEQ ID NO: 2894 - RNA, 41 nt, synthetic construct
  source 1..41: mol_type = other RNA
aaccaacacgaagagcgcaccagcttctttccacagattcc

SEQ ID NO: 2895 - RNA, 41 nt, synthetic construct
  source 1..41: mol_type = other RNA
aaccaacaaggagaggacaccagctactttccacagattcc

SEQ ID NO: 2896 - RNA, 41 nt, synthetic construct
  source 1..41: mol_type = other RNA
aaccaacacggagtcaacaccagcgtctctccacagattcc

SEQ ID NO: 2897 - RNA, 41 nt, synthetic construct
  source 1..41: mol_type = other RNA
cacggagacaacaccagcgtcttcccacacattcctttcta

SEQ ID NO: 2898 - RNA, 41 nt, synthetic construct
  source 1..41: mol_type = other RNA
aaccaacacggagacaacaccagcgtcttgccacagattcc

SEQ ID NO: 2899 - RNA, 41 nt, synthetic construct
  source 1..41: mol_type = other RNA
cacggagagagcaccagcttctttccacagattcctttcta

SEQ ID NO: 2900 - RNA, 41 nt, synthetic construct
  source 1..41: mol_type = other RNA
cacggagacaaaaccagcgtctttccacacattcctttcta

SEQ ID NO: 2901 - RNA, 41 nt, synthetic construct
  source 1..41: mol_type = other RNA
aaccaacacggagacatcaccagcgtctttccacagattcc

SEQ ID NO: 2902 - RNA, 41 nt, synthetic construct
  source 1..41: mol_type = other RNA
aaccaacacggagagaacaccaacttctttccacagattcc

SEQ ID NO: 2903 - RNA, 41 nt, synthetic construct
  source 1..41: mol_type = other RNA
aaccaacacggagacagcaacagcatctttccacagattcc

SEQ ID NO: 2904 - RNA, 43 nt, synthetic construct
  source 1..43: mol_type = other RNA
aaccaacacggagagaacaccaacctcttcttccacagattcc

SEQ ID NO: 2905 - RNA, 41 nt, synthetic construct
  source 1..41: mol_type = other RNA
cacggagagcaccccagcctctttccacagattcctttcta

SEQ ID NO: 2906 - RNA, 41 nt, synthetic construct
  source 1..41: mol_type = other RNA
aaccaacacggagacaataccagcgtctttccacagattcc

SEQ ID NO: 2907 - RNA, 41 nt, synthetic construct
  source 1..41: mol_type = other RNA
aaccaacacggagacaatgccagcgtcttgccacagattcc

SEQ ID NO: 2908 - RNA, 41 nt, synthetic construct
  source 1..41: mol_type = other RNA
aaccaacacggaactaaccccatcgtctctccacagattcc

SEQ ID NO: 2909 - RNA, 41 nt, synthetic construct
  source 1..41: mol_type = other RNA
aaccaacacggagagaacacccgcttctttccacagattcc

SEQ ID NO: 2910 - RNA, 41 nt, synthetic construct
  source 1..41: mol_type = other RNA
aaccaacacggagaggacaccagcgtctttccacagattcc

SEQ ID NO: 2911 - RNA, 41 nt, synthetic construct
  source 1..41: mol_type = other RNA
aaccaacaaggagagaagaccagcttctttccacagattcc

SEQ ID NO: 2912 - RNA, 41 nt, synthetic construct
  source 1..41: mol_type = other RNA
aaccaacacggagagaacgccagcttcttttcacagattcc

SEQ ID NO: 2913 - RNA, 40 nt, synthetic construct
  source 1..40: mol_type = other RNA
aaccaacacggagagactgccagatttttccacagattcc

SEQ ID NO: 2914 - RNA, 41 nt, synthetic construct
  source 1..41: mol_type = other RNA
cacggagagaactccgggcttcttgccacagatcctttcta

SEQ ID NO: 2915 - RNA, 41 nt, synthetic construct
  source 1..41: mol_type = other RNA
aaccaacacggagagtacaccagcttctttccacagattcc

SEQ ID NO: 2916 - RNA, 42 nt, synthetic construct
  source 1..42: mol_type = other RNA
cacggagagcacaccggcttctgttccacagatacctttcta

SEQ ID NO: 2917 - RNA, 41 nt, synthetic construct
  source 1..41: mol_type = other RNA
cacggagaggacaccagctactttccacagagtcctttcta

SEQ ID NO: 2918 - RNA, 41 nt, synthetic construct
  source 1..41: mol_type = other RNA
aaccaacactgagagaacacaagcttctttccacagattcc

SEQ ID NO: 2919 - RNA, 41 nt, synthetic construct
  source 1..41: mol_type = other RNA
gagaacactagcctctttccacagattcctttctatgttag

SEQ ID NO: 2920 - RNA, 41 nt, synthetic construct
  source 1..41: mol_type = other RNA
cacggagagaacgccagcttcttttcacagattcctttcta

SEQ ID NO: 2921 - RNA, 41 nt, synthetic construct
  source 1..41: mol_type = other RNA
aaccaacacggagagaacgccggcttctttccacagattcc

SEQ ID NO: 2922 - RNA, 41 nt, synthetic construct
  source 1..41: mol_type = other RNA
cacggagagaacaccagcttatttccacagatccctttcta

SEQ ID NO: 2923 - RNA, 41 nt, synthetic construct
  source 1..41: mol_type = other RNA
cacggagaggacaccagcctctttccaccgattcctttcta

SEQ ID NO: 2924 - RNA, 41 nt, synthetic construct
  source 1..41: mol_type = other RNA
cacggagagtacaccagtttctttccacagattcctttcta

SEQ ID NO: 2925 - RNA, 41 nt, synthetic construct
  source 1..41: mol_type = other RNA
aaccaacacaaagagaatgccagcttttttccacagattcc

SEQ ID NO: 2926 - RNA, 40 nt, synthetic construct
  source 1..40: mol_type = other RNA
cacggagagactgccagatttttccacagatgcctttcta

SEQ ID NO: 2927 - RNA, 41 nt, synthetic construct
  source 1..41: mol_type = other RNA
aaccaacacggagagaacaccggcttcttttcacagattcc

SEQ ID NO: 2928 - RNA, 41 nt, synthetic construct
  source 1..41: mol_type = other RNA
aaccaacatggatagaacaccagcttctttccacagattcc

SEQ ID NO: 2929 - RNA, 41 nt, synthetic construct
  source 1..41: mol_type = other RNA
cacggagacaacaccagcgtctctccacacacccctttcta

SEQ ID NO: 2930 - RNA, 31 nt, synthetic construct
  source 1..31: mol_type = other RNA
acggagagaacgccagcttcttttcacagat

SEQ ID NO: 2931 - RNA, 41 nt, synthetic construct
  source 1..41: mol_type = other RNA
aaccaacacggagagaacaccagttcctttccacagattcc

SEQ ID NO: 2932 - RNA, 41 nt, synthetic construct
  source 1..41: mol_type = other RNA
cacggagagaacgccggcttctttccacagattcctttcta

SEQ ID NO: 2933 - RNA, 41 nt, synthetic construct
  source 1..41: mol_type = other RNA
cacggagagtacattagcctctttccacagattcctttcta

SEQ ID NO: 2934 - RNA, 41 nt, synthetic construct
  source 1..41: mol_type = other RNA
cacggagacaacaccagcgtctttccacaggttcctttcta

SEQ ID NO: 2935 - RNA, 41 nt, synthetic construct
  source 1..41: mol_type = other RNA
cacggagagaacgccagcttctttccacagatacctttcta

SEQ ID NO: 2936 - RNA, 41 nt, synthetic construct
  source 1..41: mol_type = other RNA
aaccaacacggagagaaccccagattcttttcacagattcc

SEQ ID NO: 2937 - RNA, 42 nt, synthetic construct
  source 1..42: mol_type = other RNA
aaccaacaagggagagaacataagcttctttccacagattcc

SEQ ID NO: 2938 - RNA, 41 nt, synthetic construct
  source 1..41: mol_type = other RNA
cacggagagggcacgagcttatttccacagattcctttcta

SEQ ID NO: 2939 - RNA, 41 nt, synthetic construct
  source 1..41: mol_type = other RNA
cacggagagaacaccagttcctttccactgattcctttcta

SEQ ID NO: 2940 - RNA, 41 nt, synthetic construct
  source 1..41: mol_type = other RNA
cacggagagcacaccagcttcactccacagattcctttcta

SEQ ID NO: 2941 - RNA, 31 nt, synthetic construct
  source 1..31: mol_type = other RNA
acggagagtacaccagtttctttccacagat

SEQ ID NO: 2942 - RNA, 41 nt, synthetic construct
  source 1..41: mol_type = other RNA
cacggagagaagaccagcttctttccacagattcctttcta

SEQ ID NO: 2943 - RNA, 41 nt, synthetic construct
  source 1..41: mol_type = other RNA
cacggagagaacacaagcttatttccacagtttcctttcta

SEQ ID NO: 2944 - RNA, 41 nt, synthetic construct
  source 1..41: mol_type = other RNA
aaccaacacggagacaaaaacagcatctttccacagattcc

SEQ ID NO: 2945 - RNA, 41 nt, synthetic construct
  source 1..41: mol_type = other RNA
aaccaacagggatagaacaccagcttctttccacagattcc

SEQ ID NO: 2946 - RNA, 41 nt, synthetic construct
  source 1..41: mol_type = other RNA
cacggagacaacaccagcgtcttgccacaggctcctttcta

SEQ ID NO: 2947 - RNA, 41 nt, synthetic construct
  source 1..41: mol_type = other RNA
aaccaacacggcgagcaccccagcctctttccacagattcc

SEQ ID NO: 2948 - RNA, 41 nt, synthetic construct
  source 1..41: mol_type = other RNA
gagaacacccgcttgtttccacagattcctttctatgttag

SEQ ID NO: 2949 - RNA, 41 nt, synthetic construct
  source 1..41: mol_type = other RNA
gagaacaccagcatctttccacaggttcctttctatgttag

SEQ ID NO: 2950 - RNA, 41 nt, synthetic construct
  source 1..41: mol_type = other RNA
cacggagagaacacaagcttctttccacagagtcctttcta

SEQ ID NO: 2951 - RNA, 41 nt, synthetic construct
  source 1..41: mol_type = other RNA
aaccaacacggagagaacgccagattcttttcacagattcc

SEQ ID NO: 2952 - RNA, 41 nt, synthetic construct
  source 1..41: mol_type = other RNA
gagaacaccagcgtcttgccacaggttcctttctatgttag

SEQ ID NO: 2953 - RNA, 41 nt, synthetic construct
  source 1..41: mol_type = other RNA
aaccaacacggagacgaaaccgtgctctttccacagattcc

SEQ ID NO: 2954 - RNA, 41 nt, synthetic construct
  source 1..41: mol_type = other RNA
cacggagagaccattagcttctttccacagattcctttcta

SEQ ID NO: 2955 - RNA, 41 nt, synthetic construct
  source 1..41: mol_type = other RNA
cacggagacaacaccagcggctttccacaggttcctttcta

SEQ ID NO: 2956 - RNA, 41 nt, synthetic construct
  source 1..41: mol_type = other RNA
cacggagagaacacaataatctttccacagattcctttcta

SEQ ID NO: 2957 - RNA, 41 nt, synthetic construct
  source 1..41: mol_type = other RNA
cacggagagaacaccaacttctttccacagattcctttcta

SEQ ID NO: 2958 - RNA, 41 nt, synthetic construct
  source 1..41: mol_type = other RNA
gagaacaccagcttcactccacagattactttctatgttag

SEQ ID NO: 2959 - RNA, 41 nt, synthetic construct
  source 1..41: mol_type = other RNA
gagaacaccagcctctttccacagattactttctatgttag

SEQ ID NO: 2960 - RNA, 41 nt, synthetic construct
  source 1..41: mol_type = other RNA
gagaacacgagcttatttccacagattcctttctatgttag

SEQ ID NO: 2961 - RNA, 41 nt, synthetic construct
  source 1..41: mol_type = other RNA
cacggagagaacacaagcttctttccacaggggcctttcta

SEQ ID NO: 2962 - RNA, 41 nt, synthetic construct
  source 1..41: mol_type = other RNA
cacggagagaacagaagcctctttccacagattcctttcta

SEQ ID NO: 2963 - RNA, 39 nt, synthetic construct
  source 1..39: mol_type = other RNA
aaccaacacggagaacacaagcttatttccacagattcc

SEQ ID NO: 2964 - RNA, 47 nt, synthetic construct
  source 1..47: mol_type = other RNA
cacggagagaacaccagagattgcttgtttccacagatgcctttcta

SEQ ID NO: 2965 - RNA, 41 nt, synthetic construct
  source 1..41: mol_type = other RNA
cacggagacaacaacagcctctttccacagattcctttcta

SEQ ID NO: 2966 - RNA, 41 nt, synthetic construct
  source 1..41: mol_type = other RNA
cacggagagaacaccagcttctttccacagcttcctttcta

SEQ ID NO: 2967 - RNA, 41 nt, synthetic construct
  source 1..41: mol_type = other RNA
gagaacaccatcgtctctccacagatttctttctatgttag

SEQ ID NO: 2968 - RNA, 41 nt, synthetic construct
  source 1..41: mol_type = other RNA
cacggagagaacacaagcttcttttcacagattcctttcta

SEQ ID NO: 2969 - RNA, 41 nt, synthetic construct
  source 1..41: mol_type = other RNA
aaccaacacggagagaacacaagcttctttccacagattcc

SEQ ID NO: 2970 - RNA, 41 nt, synthetic construct
  source 1..41: mol_type = other RNA
cacggagagaacaccagtttctttccacagactcctttcta

SEQ ID NO: 2971 - RNA, 41 nt, synthetic construct
  source 1..41: mol_type = other RNA
gagaacaccagcttatctccacagatccctctctatgttag

SEQ ID NO: 2972 - RNA, 31 nt, synthetic construct
  source 1..31: mol_type = other RNA
acggagagaacacaagcttctttccacagat

SEQ ID NO: 2973 - RNA, 30 nt, synthetic construct
  source 1..30: mol_type = other RNA
acggagagaacttagcttctttccacagat

SEQ ID NO: 2974 - RNA, 41 nt, synthetic construct
  source 1..41: mol_type = other RNA
cacggagagaatcacagcttctttccacagtttcctttcta

SEQ ID NO: 2975 - RNA, 41 nt, synthetic construct
  source 1..41: mol_type = other RNA
cacggagagaatatccgtgtctttccacagattcctttcta

SEQ ID NO: 2976 - RNA, 31 nt, synthetic construct
  source 1..31: mol_type = other RNA
acggagagaccattagcttctttccacagat

SEQ ID NO: 2977 - RNA, 41 nt, synthetic construct
  source 1..41: mol_type = other RNA
aaccaacacggagagaataccagcttctttccacagattcc

SEQ ID NO: 2978 - RNA, 41 nt, synthetic construct
  source 1..41: mol_type = other RNA
aaccaacaatgagagcacaccagcttcactccacagattcc

SEQ ID NO: 2979 - RNA, 41 nt, synthetic construct
  source 1..41: mol_type = other RNA
cacggagagaacacaagcttctttccacagattcctttcta

SEQ ID NO: 2980 - RNA, 31 nt, synthetic construct
  source 1..31: mol_type = other RNA
acggagaggacaccagcttctttccacagat

SEQ ID NO: 2981 - RNA, 41 nt, synthetic construct
  source 1..41: mol_type = other RNA
gagaacaccagcttcttcccactgcttcctttctatgttag

SEQ ID NO: 2982 - RNA, 40 nt, synthetic construct
  source 1..40: mol_type = other RNA
aaccaacacgagagaacacccccttccttccacagattcc

SEQ ID NO: 2983 - RNA, 41 nt, synthetic construct
  source 1..41: mol_type = other RNA
gagaacaccagcatctttccacgggttcctttctatgttag

SEQ ID NO: 2984 - RNA, 43 nt, synthetic construct
  source 1..43: mol_type = other RNA
gagaacaccagctaggctttccacagattcttttctatgttag

SEQ ID NO: 2985 - RNA, 41 nt, synthetic construct
  source 1..41: mol_type = other RNA
gagaacacaagcttctttccacagattcttttctatgttag

SEQ ID NO: 2986 - RNA, 41 nt, synthetic construct
  source 1..41: mol_type = other RNA
cacggagagaacgactgcttctttccacagattcctttcta

SEQ ID NO: 2987 - RNA, 41 nt, synthetic construct
  source 1..41: mol_type = other RNA
aaccaacacggagagaacaccagcttatttccacagattcc

SEQ ID NO: 2988 - RNA, 41 nt, synthetic construct
  source 1..41: mol_type = other RNA
cacggagagaacacccccttccttccacagattcctttcta

SEQ ID NO: 2989 - RNA, 41 nt, synthetic construct
  source 1..41: mol_type = other RNA
gagaacaccagtttctttccacagactcttttctatgttag

SEQ ID NO: 2990 - RNA, 31 nt, synthetic construct
  source 1..31: mol_type = other RNA
agaacactagattcttttcacagattccttt

SEQ ID NO: 2991 - RNA, 41 nt, synthetic construct
  source 1..41: mol_type = other RNA
aaccaacacaaagagtacattagcctctttccacagattcc

SEQ ID NO: 2992 - RNA, 31 nt, synthetic construct
  source 1..31: mol_type = other RNA
acggaaagaacacaagcttgttcccacagat

SEQ ID NO: 2993 - RNA, 31 nt, synthetic construct
  source 1..31: mol_type = other RNA
acggagagaacacaagcttatttccacagat

SEQ ID NO: 2994 - RNA, 41 nt, synthetic construct
  source 1..41: mol_type = other RNA
cacggagacatcaccagcgtctttccacagtatcctttcta

SEQ ID NO: 2995 - RNA, 41 nt, synthetic construct
  source 1..41: mol_type = other RNA
gagaacaccagcggctttccacaggttactttatatgttag

SEQ ID NO: 2996 - RNA, 41 nt, synthetic construct
  source 1..41: mol_type = other RNA
gagaacaccagcgtctttccacacattcctttctatgttag

SEQ ID NO: 2997 - RNA, 41 nt, synthetic construct
  source 1..41: mol_type = other RNA
gcttctttccacagatgcctttcgatgttagacacacagga

SEQ ID NO: 2998 - RNA, 31 nt, synthetic construct
  source 1..31: mol_type = other RNA
acggagacaacaccagcgtcttgccacagat

SEQ ID NO: 2999 - RNA, 41 nt, synthetic construct
  source 1..41: mol_type = other RNA
cacggagagaacaccagcttccttccacagatgcctttcta

SEQ ID NO: 3000 - RNA, 31 nt, synthetic construct
  source 1..31: mol_type = other RNA
agaacgccagcgtcttgccacaggttccttt

SEQ ID NO: 3001 - RNA, 41 nt, synthetic construct
  source 1..41: mol_type = other RNA
gagaacaccaacttctttccacagatttcttgctatgttag

SEQ ID NO: 3002 - RNA, 31 nt, synthetic construct
  source 1..31: mol_type = other RNA
acggagacaatgccagcgtcttgccacagat

SEQ ID NO: 3003 - RNA, 41 nt, synthetic construct
  source 1..41: mol_type = other RNA
gagaacactagcttctttccacagattccattctatgttag

SEQ ID NO: 3004 - RNA, 30 nt, synthetic construct
  source 1..30: mol_type = other RNA
agaacaccagcttctttccacagttccttt

SEQ ID NO: 3005 - RNA, 39 nt, synthetic construct
  source 1..39: mol_type = other RNA
aaccaacacggagaacaccagcttccttccacagattcc

SEQ ID NO: 3006 - RNA, 41 nt, synthetic construct
  source 1..41: mol_type = other RNA
gagaacactagcttctttccacagattccatcatatgttag

SEQ ID NO: 3007 - RNA, 41 nt, synthetic construct
  source 1..41: mol_type = other RNA
cacggagagaaccccaggttctttccacatattcctttcta

SEQ ID NO: 3008 - RNA, 31 nt, synthetic construct
  source 1..31: mol_type = other RNA
agaacaccagcttctttccacagattccttt

SEQ ID NO: 3009 - RNA, 41 nt, synthetic construct
  source 1..41: mol_type = other RNA
gagaacaccagcttctttccacagattcctttttatgttag

SEQ ID NO: 3010 - RNA, 41 nt, synthetic construct
  source 1..41: mol_type = other RNA
cacggagagaacaccagcttcttttcacagactcctttcta

SEQ ID NO: 3011 - RNA, 41 nt, synthetic construct
  source 1..41: mol_type = other RNA
gagaacaccagcttttttccacggatcgctttctatgttag

SEQ ID NO: 3012 - RNA, 41 nt, synthetic construct
  source 1..41: mol_type = other RNA
aaccaacatcgagagtacaccagtttctttccacagattcc

SEQ ID NO: 3013 - RNA, 45 nt, synthetic construct
  source 1..45: mol_type = other RNA
aaccaacacgaggagagagaacacaagcttctttccacagattcc

SEQ ID NO: 3014 - RNA, 41 nt, synthetic construct
  source 1..41: mol_type = other RNA
cacggagatcacaccagcttctttccacagattcctttcta

SEQ ID NO: 3015 - RNA, 41 nt, synthetic construct
  source 1..41: mol_type = other RNA
cacggagacaacaccagtgtctttccacaggttcctttcta

SEQ ID NO: 3016 - RNA, 41 nt, synthetic construct
  source 1..41: mol_type = other RNA
cacggagagaagaccggcttctttccacagattcctttcta

SEQ ID NO: 3017 - RNA, 41 nt, synthetic construct
  source 1..41: mol_type = other RNA
gagaacacaagcttctttccaccgattcctttttatgttag

SEQ ID NO: 3018 - RNA, 41 nt, synthetic construct
  source 1..41: mol_type = other RNA
cacggagataaaaccagcgtctttccacacattcctttcta

SEQ ID NO: 3019 - RNA, 41 nt, synthetic construct
  source 1..41: mol_type = other RNA
gagaacaccagcctctttccacagattccattctatgttag

SEQ ID NO: 3020 - RNA, 31 nt, synthetic construct
  source 1..31: mol_type = other RNA
acggagaggacaccagcgtctttccacagat

SEQ ID NO: 3021 - RNA, 31 nt, synthetic construct
  source 1..31: mol_type = other RNA
acggagagaacaccagcttatttccacagat

SEQ ID NO: 3022 - RNA, 41 nt, synthetic construct
  source 1..41: mol_type = other RNA
gagaacaccagcttcttttcactgattcctctctatgttag

SEQ ID NO: 3023 - RNA, 31 nt, synthetic construct
  source 1..31: mol_type = other RNA
acggagagaacaccaacttctttccacagat

SEQ ID NO: 3024 - RNA, 41 nt, synthetic construct
  source 1..41: mol_type = other RNA
aaccaacatggggagaatcacagcttctttccacagattcc

SEQ ID NO: 3025 - RNA, 41 nt, synthetic construct
  source 1..41: mol_type = other RNA
cacggagagaacaccagattctttccacagatccctttcta

SEQ ID NO: 3026 - RNA, 41 nt, synthetic construct
  source 1..41: mol_type = other RNA
cacggagacagcaacagcatctttccacaggttcctttcta

SEQ ID NO: 3027 - RNA, 41 nt, synthetic construct
  source 1..41: mol_type = other RNA
cacggagagaacacccgcttctttccacagatacctttcta

SEQ ID NO: 3028 - RNA, 42 nt, synthetic construct
  source 1..42: mol_type = other RNA
gagaacaccagcgtcatttccacacattcctttctatgttag

SEQ ID NO: 3029 - RNA, 41 nt, synthetic construct
  source 1..41: mol_type = other RNA
cacggagagaacataagcttctttccaccgattcctttcta

SEQ ID NO: 3030 - RNA, 31 nt, synthetic construct
  source 1..31: mol_type = other RNA
acggagagcacaccagcttcactccacagat

SEQ ID NO: 3031 - RNA, 40 nt, synthetic construct
  source 1..40: mol_type = other RNA
cacggagagaacttagcttctttccacagattcctttcta

SEQ ID NO: 3032 - RNA, 41 nt, synthetic construct
  source 1..41: mol_type = other RNA
gagaacacccccttccttccacagattcctctctatgttag

SEQ ID NO: 3033 - RNA, 41 nt, synthetic construct
  source 1..41: mol_type = other RNA
gagaacacaagcttatttccacagattcctttctatgttag

SEQ ID NO: 3034 - RNA, 41 nt, synthetic construct
  source 1..41: mol_type = other RNA
gagaacaccagcttctttccacagattaatttctatgttag

SEQ ID NO: 3035 - RNA, 41 nt, synthetic construct
  source 1..41: mol_type = other RNA
aaccaacacggagagaataactgcgtcttttcacagattcc

SEQ ID NO: 3036 - RNA, 39 nt, synthetic construct
  source 1..39: mol_type = other RNA
gcttctttccacagtttcttttatgttagacacacagga

SEQ ID NO: 3037 - RNA, 41 nt, synthetic construct
  source 1..41: mol_type = other RNA
cacggagagaacactatcttctttccacagattcctttcta

SEQ ID NO: 3038 - RNA, 41 nt, synthetic construct
  source 1..41: mol_type = other RNA
gagaacacccgtgtctttccacagattcctttctatgttag

SEQ ID NO: 3039 - RNA, 31 nt, synthetic construct
  source 1..31: mol_type = other RNA
acggagacaacaccagtgtctttccacagat

SEQ ID NO: 3040 - RNA, 41 nt, synthetic construct
  source 1..41: mol_type = other RNA
gagaacaccagcgtctttccacagtatactttctatgttag

SEQ ID NO: 3041 - RNA, 40 nt, synthetic construct
  source 1..40: mol_type = other RNA
gagaacacaagcctctttccacagattccttctatgttag

SEQ ID NO: 3042 - RNA, 41 nt, synthetic construct
  source 1..41: mol_type = other RNA
gagaacaccagcgtctctccacggtttcctttctatgttag

SEQ ID NO: 3043 - RNA, 41 nt, synthetic construct
  source 1..41: mol_type = other RNA
gagaacaccagcgtcttcccacacattgctttctatgttag

SEQ ID NO: 3044 - RNA, 41 nt, synthetic construct
  source 1..41: mol_type = other RNA
cacggagacaatgccagcgtcttgccacaggttcctttcta

SEQ ID NO: 3045 - RNA, 41 nt, synthetic construct
  source 1..41: mol_type = other RNA
gagaacaccagcttatttccacagatctgtttctatgttag

SEQ ID NO: 3046 - RNA, 41 nt, synthetic construct
  source 1..41: mol_type = other RNA
gagaacaccagttcctttccactgattcttttctatgttag

SEQ ID NO: 3047 - RNA, 41 nt, synthetic construct
  source 1..41: mol_type = other RNA
cacggagagaacaccaactttctttccacagatcctttcta

SEQ ID NO: 3048 - RNA, 41 nt, synthetic construct
  source 1..41: mol_type = other RNA
gagaacaccagcgtctttccacaggttcctttctatgttag

SEQ ID NO: 3049 - RNA, 41 nt, synthetic construct
  source 1..41: mol_type = other RNA
cacggagacaacaccagcgtctctccacggtttcctttcta

SEQ ID NO: 3050 - RNA, 31 nt, synthetic construct
  source 1..31: mol_type = other RNA
acggagagaacaccagttcctttccacagat

SEQ ID NO: 3051 - RNA, 41 nt, synthetic construct
  source 1..41: mol_type = other RNA
gagaacaccagcttccttccacagatgcctttctatgttag

SEQ ID NO: 3052 - RNA, 31 nt, synthetic construct
  source 1..31: mol_type = other RNA
acggagagaacaccggcttcttttcacagat

SEQ ID NO: 3053 - RNA, 41 nt, synthetic construct
  source 1..41: mol_type = other RNA
gagaacacaagcttctttccacagagtactttctatgttag

SEQ ID NO: 3054 - RNA, 41 nt, synthetic construct
  source 1..41: mol_type = other RNA
gagaacaccagcttctttccacagattccttactatgttag

SEQ ID NO: 3055 - RNA, 31 nt, synthetic construct
  source 1..31: mol_type = other RNA
agaacaccagcttcactccacagattccttt

SEQ ID NO: 3056 - RNA, 40 nt, synthetic construct
  source 1..40: mol_type = other RNA
gagaacaccagcttctttccacagtttctttttatgttag

SEQ ID NO: 3057 - RNA, 31 nt, synthetic construct
  source 1..31: mol_type = other RNA
agaacaccagcttatttccacagatcccttt

SEQ ID NO: 3058 - RNA, 44 nt, synthetic construct
  source 1..44: mol_type = other RNA
gagaacacaagcttctttccacaggggacacctttttatgttag

SEQ ID NO: 3059 - RNA, 41 nt, synthetic construct
  source 1..41: mol_type = other RNA
aaccaacacggagaggataccagcttcttttcacagattcc

SEQ ID NO: 3060 - RNA, 32 nt, synthetic construct
  source 1..32: mol_type = other RNA
acggagagaacaccaactttctttccacagat

SEQ ID NO: 3061 - RNA, 31 nt, synthetic construct
  source 1..31: mol_type = other RNA
agaacaccagcgtctttccacaggttccttt

SEQ ID NO: 3062 - RNA, 31 nt, synthetic construct
  source 1..31: mol_type = other RNA
acggagagaacaccagcttcttttcacagat

SEQ ID NO: 3063 - RNA, 31 nt, synthetic construct
  source 1..31: mol_type = other RNA
agaacaccagcttccttccacagatgccttt

SEQ ID NO: 3064 - RNA, 31 nt, synthetic construct
  source 1..31: mol_type = other RNA
acggagacaacaccagcgtctttccacagat

SEQ ID NO: 3065 - RNA, 41 nt, synthetic construct
  source 1..41: mol_type = other RNA
aaccaacacggagagggtgccatcttcttttcacagattcc

SEQ ID NO: 3066 - RNA, 41 nt, synthetic construct
  source 1..41: mol_type = other RNA
gcttctttccacatattcattcagatgttggacacacagga

SEQ ID NO: 3067 - RNA, 40 nt, synthetic construct
  source 1..40: mol_type = other RNA
cacggagagataccagcttatctccacagatccctttcta

SEQ ID NO: 3068 - RNA, 42 nt, synthetic construct
  source 1..42: mol_type = other RNA
gagaacaccagtttctttccacagattctcggactatgttag

SEQ ID NO: 3069 - RNA, 40 nt, synthetic construct
  source 1..40: mol_type = other RNA
gcttctttccacagattccattcgtgttagacacacagga

SEQ ID NO: 3070 - RNA, 31 nt, synthetic construct
  source 1..31: mol_type = other RNA
acggagagaacgccagcttctttccacagat

SEQ ID NO: 3071 - RNA, 31 nt, synthetic construct
  source 1..31: mol_type = other RNA
agaacaccagcctctttccaccgattccttt

SEQ ID NO: 3072 - RNA, 31 nt, synthetic construct
  source 1..31: mol_type = other RNA
ccagcttcttttcacagacttgtttctatgt

SEQ ID NO: 3073 - RNA, 41 nt, synthetic construct
  source 1..41: mol_type = other RNA
gagaacaccggcttctttccacagattagtttctatgttag

SEQ ID NO: 3074 - RNA, 43 nt, synthetic construct
  source 1..43: mol_type = other RNA
cacggagagaacaccaacctcttcttccacagacgcctttcta

SEQ ID NO: 3075 - RNA, 31 nt, synthetic construct
  source 1..31: mol_type = other RNA
acggagagaagaccagcttctttccacagat

SEQ ID NO: 3076 - RNA, 33 nt, synthetic construct
  source 1..33: mol_type = other RNA
acggagagaacaccagctaggctttccacagat

SEQ ID NO: 3077 - RNA, 41 nt, synthetic construct
  source 1..41: mol_type = other RNA
gagaacacctgcttctttccacagattagactctatgttag

SEQ ID NO: 3078 - RNA, 41 nt, synthetic construct
  source 1..41: mol_type = other RNA
cacggagataaccccaacgtctctccacagattcctttcta

SEQ ID NO: 3079 - RNA, 41 nt, synthetic construct
  source 1..41: mol_type = other RNA
aaccaacacggagctcacaccagcttctttccacagattcc

SEQ ID NO: 3080 - RNA, 41 nt, synthetic construct
  source 1..41: mol_type = other RNA
cacggagagaacaccagcttcatttccacagctcctttcta

SEQ ID NO: 3081 - RNA, 31 nt, synthetic construct
  source 1..31: mol_type = other RNA
acggagagagcaccagcttctttccacagat

SEQ ID NO: 3082 - RNA, 40 nt, synthetic construct
  source 1..40: mol_type = other RNA
gagaacaccagcttctttccacagttcctttctatgttag

SEQ ID NO: 3083 - RNA, 41 nt, synthetic construct
  source 1..41: mol_type = other RNA
accagcttctttccacagatttctttcgatgttagacacac

SEQ ID NO: 3084 - RNA, 31 nt, synthetic construct
  source 1..31: mol_type = other RNA
agaacacaagcttctttccacagattccttt

SEQ ID NO: 3085 - RNA, 41 nt, synthetic construct
  source 1..41: mol_type = other RNA
gagaacactagcttctttccacaattttttttctatgttag

SEQ ID NO: 3086 - RNA, 31 nt, synthetic construct
  source 1..31: mol_type = other RNA
agaacaccagcgtcttcccacacattccttt

SEQ ID NO: 3087 - RNA, 41 nt, synthetic construct
  source 1..41: mol_type = other RNA
gagaacaccagcttctttccacagattccttaatatgttag

SEQ ID NO: 3088 - RNA, 31 nt, synthetic construct
  source 1..31: mol_type = other RNA
acggagagaatgccagcttttttccacagat

SEQ ID NO: 3089 - RNA, 41 nt, synthetic construct
  source 1..41: mol_type = other RNA
aaccaacaaagagagaacactagattcttttcacagattcc

SEQ ID NO: 3090 - RNA, 31 nt, synthetic construct
  source 1..31: mol_type = other RNA
acggagagaataccagcttctttccacagat

SEQ ID NO: 3091 - RNA, 41 nt, synthetic construct
  source 1..41: mol_type = other RNA
gagaacactatcttctttccacagattccttactatgttag

SEQ ID NO: 3092 - RNA, 41 nt, synthetic construct
  source 1..41: mol_type = other RNA
cacggagagggtgccatcttcttttcacagattcctttcta

SEQ ID NO: 3093 - RNA, 41 nt, synthetic construct
  source 1..41: mol_type = other RNA
gagaacaccagcttctttccacagcttcatttctatgttag

SEQ ID NO: 3094 - RNA, 41 nt, synthetic construct
  source 1..41: mol_type = other RNA
gagaacaccagcttctttccacagatttctttctatgttag

SEQ ID NO: 3095 - RNA, 31 nt, synthetic construct
  source 1..31: mol_type = other RNA
agaacactagcttctttccccagattccttt

SEQ ID NO: 3096 - RNA, 31 nt, synthetic construct
  source 1..31: mol_type = other RNA
acggagacaacaccagcgtctctccacagat

SEQ ID NO: 3097 - RNA, 39 nt, synthetic construct
  source 1..39: mol_type = other RNA
aaccaacacagagaacaccaggtctattccacagattcc

SEQ ID NO: 3098 - RNA, 41 nt, synthetic construct
  source 1..41: mol_type = other RNA
cacggagaggacaccagcttctttccacgggttcctttcta

SEQ ID NO: 3099 - RNA, 44 nt, synthetic construct
  source 1..44: mol_type = other RNA
aaccaacaatgaggagagaacagaagcctctttccacagattcc

SEQ ID NO: 3100 - RNA, 41 nt, synthetic construct
  source 1..41: mol_type = other RNA
gagaacaccggcttcttttcacagatcaatttctatgttag

SEQ ID NO: 3101 - RNA, 41 nt, synthetic construct
  source 1..41: mol_type = other RNA
gagaacacaagcttctctccacagatttttttctatgttag

SEQ ID NO: 3102 - RNA, 41 nt, synthetic construct
  source 1..41: mol_type = other RNA
aaccaacacggggaggacaccagcttctttccacagattcc

SEQ ID NO: 3103 - RNA, 42 nt, synthetic construct
  source 1..42: mol_type = other RNA
aaccaacagagagagcacaccggcttctgttccacagattcc

SEQ ID NO: 3104 - RNA, 31 nt, synthetic construct
  source 1..31: mol_type = other RNA
acggagaggacaccagctactttccacagat

SEQ ID NO: 3105 - RNA, 41 nt, synthetic construct
  source 1..41: mol_type = other RNA
cacggagagaacactagattcttttcacagattcctttcta

SEQ ID NO: 3106 - RNA, 41 nt, synthetic construct
  source 1..41: mol_type = other RNA
gagaacacaagcttgttcccacatattaatttctatgttag

SEQ ID NO: 3107 - RNA, 31 nt, synthetic construct
  source 1..31: mol_type = other RNA
acggagagcaccccagcctctttccacagat

SEQ ID NO: 3108 - RNA, 41 nt, synthetic construct
  source 1..41: mol_type = other RNA
gagaacaccagcgtctttccacgggttcctttctatgttag

SEQ ID NO: 3109 - RNA, 41 nt, synthetic construct
  source 1..41: mol_type = other RNA
cacggagagaacgactgcttcttttcacagatccctttcta

SEQ ID NO: 3110 - RNA, 41 nt, synthetic construct
  source 1..41: mol_type = other RNA
aaccaacaaggagagagcaccagcttctttccacagattcc

SEQ ID NO: 3111 - RNA, 43 nt, synthetic construct
  source 1..43: mol_type = other RNA
gagaacaccagcttctttccacagataccttcctctatgttag

SEQ ID NO: 3112 - RNA, 41 nt, synthetic construct
  source 1..41: mol_type = other RNA
gcttctttccacagattccttccgatgttaaaaacacagga

SEQ ID NO: 3113 - RNA, 41 nt, synthetic construct
  source 1..41: mol_type = other RNA
gcttctttccacagatttctttcgatgttagacacacagga

SEQ ID NO: 3114 - RNA, 41 nt, synthetic construct
  source 1..41: mol_type = other RNA
gcttctttccacagattactttcgatgttagacacacagga

SEQ ID NO: 3115 - RNA, 31 nt, synthetic construct
  source 1..31: mol_type = other RNA
agaacacaagcttatttccacagtttccttt

SEQ ID NO: 3116 - RNA, 31 nt, synthetic construct
  source 1..31: mol_type = other RNA
acggagagcgcaccagcttctttccacagat

SEQ ID NO: 3117 - RNA, 31 nt, synthetic construct
  source 1..31: mol_type = other RNA
ccagcttcttttcactgattcctctctatgt

SEQ ID NO: 3118 - RNA, 41 nt, synthetic construct
  source 1..41: mol_type = other RNA
gagaacaccagtgtctttccacaggttcctttctatgttag

SEQ ID NO: 3119 - RNA, 42 nt, synthetic construct
  source 1..42: mol_type = other RNA
gagaacaccaactttctttccacagatcctttcttatgttag

SEQ ID NO: 3120 - RNA, 31 nt, synthetic construct
  source 1..31: mol_type = other RNA
agaaccccagcctctttccacagattccttt

SEQ ID NO: 3121 - RNA, 41 nt, synthetic construct
  source 1..41: mol_type = other RNA
accagcttccttccacagattcctctcgctgttagacacac

SEQ ID NO: 3122 - RNA, 31 nt, synthetic construct
  source 1..31: mol_type = other RNA
agaacaccagcggctttccacaggttccttt

SEQ ID NO: 3123 - RNA, 31 nt, synthetic construct
  source 1..31: mol_type = other RNA
agaacaccagctactttccacagagtccttt

SEQ ID NO: 3124 - RNA, 41 nt, synthetic construct
  source 1..41: mol_type = other RNA
gagaacaccatcttcttttcacagattccttggtatgttag

SEQ ID NO: 3125 - RNA, 40 nt, synthetic construct
  source 1..40: mol_type = other RNA
gcttctttccacagttcctttcgatgttagacacacagga

SEQ ID NO: 3126 - RNA, 31 nt, synthetic construct
  source 1..31: mol_type = other RNA
acggagacatcaccagcgtctttccacagat

SEQ ID NO: 3127 - RNA, 41 nt, synthetic construct
  source 1..41: mol_type = other RNA
aaccaacatggatagaacaccagcttcttcccacagattcc

SEQ ID NO: 3128 - RNA, 41 nt, synthetic construct
  source 1..41: mol_type = other RNA
accagcttccttccacagatgcctttcgatgttagacacac

SEQ ID NO: 3129 - RNA, 41 nt, synthetic construct
  source 1..41: mol_type = other RNA
gcttctttccacagattcctttcgatgttagacacacagga

SEQ ID NO: 3130 - RNA, 41 nt, synthetic construct
  source 1..41: mol_type = other RNA
accagcttcttttcacagattccttttgatcttagacacac

SEQ ID NO: 3131 - RNA, 40 nt, synthetic construct
  source 1..40: mol_type = other RNA
aaccaacacggagggataccagcttatctccacagattcc

SEQ ID NO: 3132 - RNA, 41 nt, synthetic construct
  source 1..41: mol_type = other RNA
cacggagaggaggcaagcttgcttccaccgattcctttcta

SEQ ID NO: 3133 - RNA, 31 nt, synthetic construct
  source 1..31: mol_type = other RNA
acggagagagcgcaagcttatttccacagat

SEQ ID NO: 3134 - RNA, 32 nt, synthetic construct
  source 1..32: mol_type = other RNA
agaacaccggcttctgttccacagataccttt

SEQ ID NO: 3135 - RNA, 41 nt, synthetic construct
  source 1..41: mol_type = other RNA
cacggagagaacaccggcttcttttcacagatccctttcta

SEQ ID NO: 3136 - RNA, 41 nt, synthetic construct
  source 1..41: mol_type = other RNA
accagcttctctccacagatttctttcgatgttagacacac

SEQ ID NO: 3137 - RNA, 41 nt, synthetic construct
  source 1..41: mol_type = other RNA
gcttctttccacagatccctttcgatgttgaacacacagga

SEQ ID NO: 3138 - RNA, 37 nt, synthetic construct
  source 1..37: mol_type = other RNA
aaccaacacggagagaacactctcttccacagattcc

SEQ ID NO: 3139 - RNA, 41 nt, synthetic construct
  source 1..41: mol_type = other RNA
cacggagagaatgccagcttttttccacggatccctttcta

SEQ ID NO: 3140 - RNA, 40 nt, synthetic construct
  source 1..40: mol_type = other RNA
gagaacaccagattctttccacagatccattttatgttag

SEQ ID NO: 3141 - RNA, 42 nt, synthetic construct
  source 1..42: mol_type = other RNA
aaccaacacggcatgaatacaaagttctgttccacagattcc

SEQ ID NO: 3142 - RNA, 41 nt, synthetic construct
  source 1..41: mol_type = other RNA
cacggagacaataccagcgtctttccacgggttcctttcta

SEQ ID NO: 3143 - RNA, 44 nt, synthetic construct
  source 1..44: mol_type = other RNA
accagcttctttccacaggggacaccttttgatgttagacacac

SEQ ID NO: 3144 - RNA, 31 nt, synthetic construct
  source 1..31: mol_type = other RNA
acggatagaacaccagcttctttccacagat

SEQ ID NO: 3145 - RNA, 41 nt, synthetic construct
  source 1..41: mol_type = other RNA
cacggagagaaccccagattcttttcacagattcctttcta

SEQ ID NO: 3146 - RNA, 40 nt, synthetic construct
  source 1..40: mol_type = other RNA
accagcttctttccacagttcctttcgatgttagacacac

SEQ ID NO: 3147 - RNA, 32 nt, synthetic construct
  source 1..32: mol_type = other RNA
acggaatgaatacaaagttctgttccacagat

SEQ ID NO: 3148 - RNA, 31 nt, synthetic construct
  source 1..31: mol_type = other RNA
acggagctcacaccagcttctttccacagat

SEQ ID NO: 3149 - RNA, 47 nt, synthetic construct
  source 1..47: mol_type = other RNA
cacggagagaacaccagaggttgcttgtttccgcagatgcctttcta

SEQ ID NO: 3150 - RNA, 31 nt, synthetic construct
  source 1..31: mol_type = other RNA
agaacaccagcgtctttccatagattccttt

SEQ ID NO: 3151 - RNA, 41 nt, synthetic construct
  source 1..41: mol_type = other RNA
gcttctttccacagattcttttcgatgttagacacacagga

SEQ ID NO: 3152 - RNA, 31 nt, synthetic construct
  source 1..31: mol_type = other RNA
ccagcttcttttcacagattccttactatgt

SEQ ID NO: 3153 - RNA, 41 nt, synthetic construct
  source 1..41: mol_type = other RNA
aaccaacatggagagaacactatcttctttccacagattcc

SEQ ID NO: 3154 - RNA, 31 nt, synthetic construct
  source 1..31: mol_type = other RNA
agaactccgggcttcttgccacagatccttt

SEQ ID NO: 3155 - RNA, 31 nt, synthetic construct
  source 1..31: mol_type = other RNA
agaacaccagcgtctttccacagtatccttt

SEQ ID NO: 3156 - RNA, 31 nt, synthetic construct
  source 1..31: mol_type = other RNA
ccagcttctttccacagattcctttttatgt

SEQ ID NO: 3157 - RNA, 31 nt, synthetic construct
  source 1..31: mol_type = other RNA
agaacaccaacttctttccacagattccttt

SEQ ID NO: 3158 - RNA, 47 nt, synthetic construct
  source 1..47: mol_type = other RNA
aaccaacacgaggagaacaccagaggttgcttgtttccgcagattcc

SEQ ID NO: 3159 - RNA, 31 nt, synthetic construct
  source 1..31: mol_type = other RNA
acggagagaaccccaggttctttccacagat

SEQ ID NO: 3160 - RNA, 41 nt, synthetic construct
  source 1..41: mol_type = other RNA
gagaacaccggcttctttccacagattacttgatatgttag

SEQ ID NO: 3161 - RNA, 31 nt, synthetic construct
  source 1..31: mol_type = other RNA
acggagagaacactatcttctttccacagat

SEQ ID NO: 3162 - RNA, 42 nt, synthetic construct
  source 1..42: mol_type = other RNA
cacggagacagcaccagcgtcatttccacacattcctttcta

SEQ ID NO: 3163 - RNA, 31 nt, synthetic construct
  source 1..31: mol_type = other RNA
acggagataaaaccagcgtctttccacagat

SEQ ID NO: 3164 - RNA, 31 nt, synthetic construct
  source 1..31: mol_type = other RNA
acggaaagaacaccagtttctttccacagat

SEQ ID NO: 3165 - RNA, 41 nt, synthetic construct
  source 1..41: mol_type = other RNA
gagaacaccaggttctttccacatattcattcatatgttag

SEQ ID NO: 3166 - RNA, 41 nt, synthetic construct
  source 1..41: mol_type = other RNA
accagcttctttccacagattcttttcgatgtcagacacac

SEQ ID NO: 3167 - RNA, 31 nt, synthetic construct
  source 1..31: mol_type = other RNA
agaacaccagtgtctttccacaggttccttt

SEQ ID NO: 3168 - RNA, 31 nt, synthetic construct
  source 1..31: mol_type = other RNA
acggagacaacaccagcggctttccacagat

SEQ ID NO: 3169 - RNA, 31 nt, synthetic construct
  source 1..31: mol_type = other RNA
agaacaccagcttcttcccactgcttccttt

SEQ ID NO: 3170 - RNA, 41 nt, synthetic construct
  source 1..41: mol_type = other RNA
gcttctttccacagatttctttcgctgttagacacacagga

SEQ ID NO: 3171 - RNA, 40 nt, synthetic construct
  source 1..40: mol_type = other RNA
cacggagagcgcaccagcttctttccacagttcctttcta

SEQ ID NO: 3172 - RNA, 41 nt, synthetic construct
  source 1..41: mol_type = other RNA
aaccaacacggagagaacaccagcttcttttcacagattcc

SEQ ID NO: 3173 - RNA, 41 nt, synthetic construct
  source 1..41: mol_type = other RNA
accagcttcttcccactgcttcctttcgatgttagacacac

SEQ ID NO: 3174 - RNA, 31 nt, synthetic construct
  source 1..31: mol_type = other RNA
agaacaccggcttctttccacagattccttt

SEQ ID NO: 3175 - RNA, 30 nt, synthetic construct
  source 1..30: mol_type = other RNA
ccagcttctttccacagatccattttatgt

SEQ ID NO: 3176 - RNA, 31 nt, synthetic construct
  source 1..31: mol_type = other RNA
agaacaccagttcctttccactgattccttt

SEQ ID NO: 3177 - RNA, 41 nt, synthetic construct
  source 1..41: mol_type = other RNA
gcttctttccacagattcctttcgatgttagtcacacagga

SEQ ID NO: 3178 - RNA, 33 nt, synthetic construct
  source 1..33: mol_type = other RNA
agaacaccagctaggctttccacagattccttt

SEQ ID NO: 3179 - RNA, 41 nt, synthetic construct
  source 1..41: mol_type = other RNA
gcttctttccactgcttcctttcgatgttagacacacagga

SEQ ID NO: 3180 - RNA, 41 nt, synthetic construct
  source 1..41: mol_type = other RNA
accagcttctttccacagagtactttcgatgttagacacac

SEQ ID NO: 3181 - RNA, 41 nt, synthetic construct
  source 1..41: mol_type = other RNA
cacggagagaacacaagcttgttcccacatattcctttcta

SEQ ID NO: 3182 - RNA, 41 nt, synthetic construct
  source 1..41: mol_type = other RNA
gagaacaccagcttcttttcacagacttgtttctatgttag

SEQ ID NO: 3183 - RNA, 41 nt, synthetic construct
  source 1..41: mol_type = other RNA
gcttctttccacagattccttacgatgttagacacacagga

SEQ ID NO: 3184 - RNA, 43 nt, synthetic construct
  source 1..43: mol_type = other RNA
cacggagagaacgccagattcttttcacagccattcctttcta

SEQ ID NO: 3185 - RNA, 41 nt, synthetic construct
  source 1..41: mol_type = other RNA
gcttctttccacagattcctttcgatgttcgacacacagga

SEQ ID NO: 3186 - RNA, 31 nt, synthetic construct
  source 1..31: mol_type = other RNA
acggagtcaacaccagcgtctctccacagat

SEQ ID NO: 3187 - RNA, 31 nt, synthetic construct
  source 1..31: mol_type = other RNA
agaacacccgcttctttccacagataccttt

SEQ ID NO: 3188 - RNA, 41 nt, synthetic construct
  source 1..41: mol_type = other RNA
gcttctttccacagagtactttcgatgttaaacacacagga

SEQ ID NO: 3189 - RNA, 44 nt, synthetic construct
  source 1..44: mol_type = other RNA
cacggagagaaatacactagcttctttccacaatttcctttcta

SEQ ID NO: 3190 - RNA, 41 nt, synthetic construct
  source 1..41: mol_type = other RNA
gcttctttccacaggttcctttcgatgttagacacacagga

SEQ ID NO: 3191 - RNA, 31 nt, synthetic construct
  source 1..31: mol_type = other RNA
agaacgccagcttttttccacggatcccttt

SEQ ID NO: 3192 - RNA, 31 nt, synthetic construct
  source 1..31: mol_type = other RNA
agaacaccagcttcatttccacagctccttt

SEQ ID NO: 3193 - RNA, 37 nt, synthetic construct
  source 1..37: mol_type = other RNA
acaccctcttccaaagtagaccgagatcgcatttcta

SEQ ID NO: 3194 - RNA, 43 nt, synthetic construct
  source 1..43: mol_type = other RNA
gcttctttccaccgattcgtacatcgcggttagacacacagga

SEQ ID NO: 3195 - RNA, 41 nt, synthetic construct
  source 1..41: mol_type = other RNA
cacggagagtacaccggcttcttttcacagattcctttcta

SEQ ID NO: 3196 - RNA, 41 nt, synthetic construct
  source 1..41: mol_type = other RNA
gcttctttccacagattaatttcgatgttaggcacacagga

SEQ ID NO: 3197 - RNA, 42 nt, synthetic construct
  source 1..42: mol_type = other RNA
cacggagagaatacaaagttctgttccacagattcctttcta

SEQ ID NO: 3198 - RNA, 31 nt, synthetic construct
  source 1..31: mol_type = other RNA
agaacaccagtttctttccacagactccttt

SEQ ID NO: 3199 - RNA, 31 nt, synthetic construct
  source 1..31: mol_type = other RNA
agaacacgagcttatttccacagattccttt

SEQ ID NO: 3200 - RNA, 41 nt, synthetic construct
  source 1..41: mol_type = other RNA
accagcttcttgccacaggttcctttcgatgttagacacac

SEQ ID NO: 3201 - RNA, 31 nt, synthetic construct
  source 1..31: mol_type = other RNA
agaacaccagcgtctttccacacattccttt

SEQ ID NO: 3202 - RNA, 41 nt, synthetic construct
  source 1..41: mol_type = other RNA
gcttctttccacagattcttttcgatgttacacacacagga

SEQ ID NO: 3203 - RNA, 31 nt, synthetic construct
  source 1..31: mol_type = other RNA
agaacgccagcttctttccacagataccttt

SEQ ID NO: 3204 - RNA, 31 nt, synthetic construct
  source 1..31: mol_type = other RNA
tctttccacagatgaatttcggcgttagaca

SEQ ID NO: 3205 - RNA, 42 nt, synthetic construct
  source 1..42: mol_type = other RNA
gcttctttccacagattctcggacgatgttcgacacacagga

SEQ ID NO: 3206 - RNA, 41 nt, synthetic construct
  source 1..41: mol_type = other RNA
gagaacaccagcttcttttcacagatccgtttctatgttag

SEQ ID NO: 3207 - RNA, 41 nt, synthetic construct
  source 1..41: mol_type = other RNA
accagcttcttttcacagatccttttcgatgtcagacacac

SEQ ID NO: 3208 - RNA, 41 nt, synthetic construct
  source 1..41: mol_type = other RNA
gagaacactagattcttttcacagattccttactatgttag

SEQ ID NO: 3209 - RNA, 41 nt, synthetic construct
  source 1..41: mol_type = other RNA
gcttctttccacaggttactttagatgttagacacacagga

SEQ ID NO: 3210 - RNA, 41 nt, synthetic construct
  source 1..41: mol_type = other RNA
aaccaacacggatagatcattcacctcttatcgcagattcc

SEQ ID NO: 3211 - RNA, 41 nt, synthetic construct
  source 1..41: mol_type = other RNA
cacggagagaacaccagcttctttccacagattcctttcta

SEQ ID NO: 3212 - RNA, 41 nt, synthetic construct
  source 1..41: mol_type = other RNA
accagcttatctccacagatccctctcgatggcagacacac

SEQ ID NO: 3213 - RNA, 47 nt, synthetic construct
  source 1..47: mol_type = other RNA
aaccaacaaaaagagaacaccagagattgcttgtttccacagattcc

SEQ ID NO: 3214 - RNA, 40 nt, synthetic construct
  source 1..40: mol_type = other RNA
gcttctttccacagatccatttgatgttagacacacagga

SEQ ID NO: 3215 - RNA, 31 nt, synthetic construct
  source 1..31: mol_type = other RNA
agaacataagcttctttccaccgattccttt

SEQ ID NO: 3216 - RNA, 41 nt, synthetic construct
  source 1..41: mol_type = other RNA
accagcttctttccacagattactttcgatgttagacacac

SEQ ID NO: 3217 - RNA, 31 nt, synthetic construct
  source 1..31: mol_type = other RNA
acggagagaacacccgcttctttccacagat

SEQ ID NO: 3218 - RNA, 41 nt, synthetic construct
  source 1..41: mol_type = other RNA
accagcttctttccacacattcctttcgatgatagacacac

SEQ ID NO: 3219 - RNA, 41 nt, synthetic construct
  source 1..41: mol_type = other RNA
accagcttctttccacagattaatttcgatgttagacacac

SEQ ID NO: 3220 - RNA, 31 nt, synthetic construct
  source 1..31: mol_type = other RNA
agaacatccgcttgtttccacagattccttt

SEQ ID NO: 3221 - RNA, 41 nt, synthetic construct
  source 1..41: mol_type = other RNA
gcttctttccacaggttgatttcgatgttagacacacagga

SEQ ID NO: 3222 - RNA, 31 nt, synthetic construct
  source 1..31: mol_type = other RNA
agaacattagcttctttccacagattccttt

SEQ ID NO: 3223 - RNA, 41 nt, synthetic construct
  source 1..41: mol_type = other RNA
accagcttctttccacagattcttttcgatgttagacacac

SEQ ID NO: 3224 - RNA, 31 nt, synthetic construct
  source 1..31: mol_type = other RNA
acggaactaaccccatcgtctctccacagat

SEQ ID NO: 3225 - RNA, 41 nt, synthetic construct
  source 1..41: mol_type = other RNA
gcttctttccacagtatactttcgatcttagacacacagga

SEQ ID NO: 3226 - RNA, 41 nt, synthetic construct
  source 1..41: mol_type = other RNA
accagcttctttccacagattccttacgatgttagacacac

SEQ ID NO: 3227 - RNA, 41 nt, synthetic construct
  source 1..41: mol_type = other RNA
gcttctttccacagatttctttcgatgttagaaacacagga

SEQ ID NO: 3228 - RNA, 41 nt, synthetic construct
  source 1..41: mol_type = other RNA
gcttctttccacagattacttgagatgtgagacacacagga

SEQ ID NO: 3229 - RNA, 31 nt, synthetic construct
  source 1..31: mol_type = other RNA
agaaccacagcttctttccacagtttccttt

SEQ ID NO: 3230 - RNA, 31 nt, synthetic construct
  source 1..31: mol_type = other RNA
agaacattagcctctttccacagattccttt

SEQ ID NO: 3231 - RNA, 31 nt, synthetic construct
  source 1..31: mol_type = other RNA
acggagagaacgccggcttctttccacagat

SEQ ID NO: 3232 - RNA, 31 nt, synthetic construct
  source 1..31: mol_type = other RNA
tcttttcacagattccttacgatgttagaca

SEQ ID NO: 3233 - RNA, 33 nt, synthetic construct
  source 1..33: mol_type = other RNA
ccagcttcttttcacagattcgtacttctatgt

SEQ ID NO: 3234 - RNA, 41 nt, synthetic construct
  source 1..41: mol_type = other RNA
aaccaacacggagagtacaccggcttcttttcacagattcc

SEQ ID NO: 3235 - RNA, 30 nt, synthetic construct
  source 1..30: mol_type = other RNA
acggaagaacaccagcttccttccacagat

SEQ ID NO: 3236 - RNA, 41 nt, synthetic construct
  source 1..41: mol_type = other RNA
gcttctttccacagatttcttgcgatgtgagacacacagga

SEQ ID NO: 3237 - RNA, 32 nt, synthetic construct
  source 1..32: mol_type = other RNA
acggagagcacaccggcttctgttccacagat

SEQ ID NO: 3238 - RNA, 41 nt, synthetic construct
  source 1..41: mol_type = other RNA
gcttctttccacacattcctttcgatgatagacacacagga

SEQ ID NO: 3239 - RNA, 52 nt, synthetic construct
  source 1..52: mol_type = other RNA
gcttctttccacagataacaaaaataccactttagatgttagacacacagga

SEQ ID NO: 3240 - RNA, 31 nt, synthetic construct
  source 1..31: mol_type = other RNA
acggagagaacaccaggtctattccacagat

SEQ ID NO: 3241 - RNA, 31 nt, synthetic construct
  source 1..31: mol_type = other RNA
acggagagaacacccccttccttccacagat

SEQ ID NO: 3242 - RNA, 41 nt, synthetic construct
  source 1..41: mol_type = other RNA
gcttctttgcacagattcctttcgatgttagacacacagga

SEQ ID NO: 3243 - RNA, 31 nt, synthetic construct
  source 1..31: mol_type = other RNA
agaacactcacttcttatcacagattccttt

SEQ ID NO: 3244 - RNA, 41 nt, synthetic construct
  source 1..41: mol_type = other RNA
gcttctttccacaggctagtttcgatgttagacacacagga

SEQ ID NO: 3245 - RNA, 31 nt, synthetic construct
  source 1..31: mol_type = other RNA
acggagagtacattagcctctttccacagat

SEQ ID NO: 3246 - RNA, 41 nt, synthetic construct
  source 1..41: mol_type = other RNA
gagaacaccggcttcttttcacagatccctttctatgttag

SEQ ID NO: 3247 - RNA, 31 nt, synthetic construct
  source 1..31: mol_type = other RNA
ccagcgtctttccacaggttcctttctatgt

SEQ ID NO: 3248 - RNA, 41 nt, synthetic construct
  source 1..41: mol_type = other RNA
gagaacacaagcttcttttcacagattcctttttatgttag

SEQ ID NO: 3249 - RNA, 42 nt, synthetic construct
  source 1..42: mol_type = other RNA
accagcttctttccacagattctcggacgatgttagacacac

SEQ ID NO: 3250 - RNA, 43 nt, synthetic construct
  source 1..43: mol_type = other RNA
gagaacaccagcttcttttcacagattcgtacttctatgttag

SEQ ID NO: 3251 - RNA, 41 nt, synthetic construct
  source 1..41: mol_type = other RNA
accagcttctttccacaggttcctttcgatgttagacacac

SEQ ID NO: 3252 - RNA, 41 nt, synthetic construct
  source 1..41: mol_type = other RNA
accagcttctttccacagattagtttcgatgttagacacac

SEQ ID NO: 3253 - RNA, 31 nt, synthetic construct
  source 1..31: mol_type = other RNA
agaacaccagcgtctctccacacaccccttt

SEQ ID NO: 3254 - RNA, 31 nt, synthetic construct
  source 1..31: mol_type = other RNA
acggagagaacagaagcctctttccacagat

SEQ ID NO: 3255 - RNA, 42 nt, synthetic construct
  source 1..42: mol_type = other RNA
gagaacaccgggcttcttgccacagatccgcatctatgttag

SEQ ID NO: 3256 - RNA, 31 nt, synthetic construct
  source 1..31: mol_type = other RNA
agaacaccagcttctttccacagcttccttt

SEQ ID NO: 3257 - RNA, 31 nt, synthetic construct
  source 1..31: mol_type = other RNA
agaacaccagcttcttttcacagactccttt

SEQ ID NO: 3258 - RNA, 31 nt, synthetic construct
  source 1..31: mol_type = other RNA
tctttccaaagatgcttttcgatgttagaca

SEQ ID NO: 3259 - RNA, 41 nt, synthetic construct
  source 1..41: mol_type = other RNA
gagaacaccagcgtcttgccacaggctagtttctatgttag

SEQ ID NO: 3260 - RNA, 52 nt, synthetic construct
  source 1..52: mol_type = other RNA
gagaacacccgcttctttccacagataacaaaaataccactttatatgttag

SEQ ID NO: 3261 - RNA, 41 nt, synthetic construct
  source 1..41: mol_type = other RNA
gcttctttccacagattccttacgatgtcagacacacagga

SEQ ID NO: 3262 - RNA, 31 nt, synthetic construct
  source 1..31: mol_type = other RNA
agaacatccgtgtctttccacagattccttt

SEQ ID NO: 3263 - RNA, 31 nt, synthetic construct
  source 1..31: mol_type = other RNA
acggagagaacatccgcttgtttccacagat

SEQ ID NO: 3264 - RNA, 31 nt, synthetic construct
  source 1..31: mol_type = other RNA
acggagaggacaccagcctctttccacagat

SEQ ID NO: 3265 - RNA, 31 nt, synthetic construct
  source 1..31: mol_type = other RNA
acaccagcttatttccacagtttcttttcta

SEQ ID NO: 3266 - RNA, 42 nt, synthetic construct
  source 1..42: mol_type = other RNA
gagaacaccggcttctgttccacagataaaactttatgttag

SEQ ID NO: 3267 - RNA, 39 nt, synthetic construct
  source 1..39: mol_type = other RNA
accagcttctttccacagtttcttttatgttagacacac

SEQ ID NO: 3268 - RNA, 31 nt, synthetic construct
  source 1..31: mol_type = other RNA
acggagagaacataagcttctttccacagat

SEQ ID NO: 3269 - RNA, 41 nt, synthetic construct
  source 1..41: mol_type = other RNA
accagcttctttccacagattcctttcgatgttagacacac

SEQ ID NO: 3270 - RNA, 41 nt, synthetic construct
  source 1..41: mol_type = other RNA
gcttctttccacagatcctttctgatgtcggacacacagga

SEQ ID NO: 3271 - RNA, 41 nt, synthetic construct
  source 1..41: mol_type = other RNA
gagaacacaagcttatttccacagtttcttaagtatgttag

SEQ ID NO: 3272 - RNA, 44 nt, synthetic construct
  source 1..44: mol_type = other RNA
gcttctttccacaggggacaccttttgatgttagagacacagga

SEQ ID NO: 3273 - RNA, 31 nt, synthetic construct
  source 1..31: mol_type = other RNA
acaccagcttctttccacagattcctttcta

SEQ ID NO: 3274 - RNA, 41 nt, synthetic construct
  source 1..41: mol_type = other RNA
accagcttatatccagagaatcatttcgatgttagacacac

SEQ ID NO: 3275 - RNA, 33 nt, synthetic construct
  source 1..33: mol_type = other RNA
acggagagaacaccaacctcttcttccacagat

SEQ ID NO: 3276 - RNA, 41 nt, synthetic construct
  source 1..41: mol_type = other RNA
gagaacacaataatctttccacagattccttcctatgttag

SEQ ID NO: 3277 - RNA, 41 nt, synthetic construct
  source 1..41: mol_type = other RNA
cacggagacaaaaacagcatctttccacgggttcctttcta

SEQ ID NO: 3278 - RNA, 41 nt, synthetic construct
  source 1..41: mol_type = other RNA
accagcttatttccacagattcctttcgatgttagacacac

SEQ ID NO: 3279 - RNA, 52 nt, synthetic construct
  source 1..52: mol_type = other RNA
gagaacaccagcctctttccaccgattccaccaaaaataccatctatgttag

SEQ ID NO: 3280 - RNA, 31 nt, synthetic construct
  source 1..31: mol_type = other RNA
ccagcttctttccacaggttgatttctatgt

SEQ ID NO: 3281 - RNA, 42 nt, synthetic construct
  source 1..42: mol_type = other RNA
aaccaacacggagagaacaccaactttctttccacagattcc

SEQ ID NO: 3282 - RNA, 41 nt, synthetic construct
  source 1..41: mol_type = other RNA
gcttctttccacagattccttttgatcttacgcacacagga

SEQ ID NO: 3283 - RNA, 31 nt, synthetic construct
  source 1..31: mol_type = other RNA
acaccggcttcttttcacagatccctttcta

SEQ ID NO: 3284 - RNA, 31 nt, synthetic construct
  source 1..31: mol_type = other RNA
agaacacaagcttctttccacaggggccttt

SEQ ID NO: 3285 - RNA, 41 nt, synthetic construct
  source 1..41: mol_type = other RNA
gcttctttccacggtttcctttcgatattagacacacagga

SEQ ID NO: 3286 - RNA, 41 nt, synthetic construct
  source 1..41: mol_type = other RNA
gcttctttccacagattagactcgctgttagctacacagga

SEQ ID NO: 3287 - RNA, 41 nt, synthetic construct
  source 1..41: mol_type = other RNA
gcttctttccacagatgcacttcgatattagacacacagga

SEQ ID NO: 3288 - RNA, 31 nt, synthetic construct
  source 1..31: mol_type = other RNA
agaacaccagtttctttccacagattccttt

SEQ ID NO: 3289 - RNA, 41 nt, synthetic construct
  source 1..41: mol_type = other RNA
accagcttcttttcacagattcctttcgatgtcagacacac

SEQ ID NO: 3290 - RNA, 31 nt, synthetic construct
  source 1..31: mol_type = other RNA
ccagcgtcttgccacaggttcctttctatgt

SEQ ID NO: 3291 - RNA, 31 nt, synthetic construct
  source 1..31: mol_type = other RNA
agaacaccagcttatctccacagatcccttt

SEQ ID NO: 3292 - RNA, 47 nt, synthetic construct
  source 1..47: mol_type = other RNA
gagaacaccagagattgcttgtttccacagatgaatttctatgttag

SEQ ID NO: 3293 - RNA, 41 nt, synthetic construct
  source 1..41: mol_type = other RNA
accagcttctttccacagattccttccgatgttagacacac

SEQ ID NO: 3294 - RNA, 42 nt, synthetic construct
  source 1..42: mol_type = other RNA
gcttctttccacagattccttaaagatgttagagacacagga

SEQ ID NO: 3295 - RNA, 43 nt, synthetic construct
  source 1..43: mol_type = other RNA
gagaacaccgtgctctttccacagaatgcacttgatatgttag

SEQ ID NO: 3296 - RNA, 41 nt, synthetic construct
  source 1..41: mol_type = other RNA
accagcttctttccacagatcctattcgatgttagacacac

SEQ ID NO: 3297 - RNA, 32 nt, synthetic construct
  source 1..32: mol_type = other RNA
agaacaccagcgtcatttccacacattccttt

SEQ ID NO: 3298 - RNA, 38 nt, synthetic construct
  source 1..38: mol_type = other RNA
gagaacaccagcttcatttccacagctctctatgttag

SEQ ID NO: 3299 - RNA, 41 nt, synthetic construct
  source 1..41: mol_type = other RNA
cacggagagtacaccagcttctttccacagattcctttcta

SEQ ID NO: 3300 - RNA, 31 nt, synthetic construct
  source 1..31: mol_type = other RNA
agaacaacagcctctttccacagattccttt

SEQ ID NO: 3301 - RNA, 31 nt, synthetic construct
  source 1..31: mol_type = other RNA
agaacaccagattctttccacagatcccttt

SEQ ID NO: 3302 - RNA, 31 nt, synthetic construct
  source 1..31: mol_type = other RNA
tctttccacagattccttccgatgttagaca

SEQ ID NO: 3303 - RNA, 41 nt, synthetic construct
  source 1..41: mol_type = other RNA
accagcttctttccacagatttctttcgctgttagacacac

SEQ ID NO: 3304 - RNA, 31 nt, synthetic construct
  source 1..31: mol_type = other RNA
agaacgactgcttctttccacagattccttt

SEQ ID NO: 3305 - RNA, 52 nt, synthetic construct
  source 1..52: mol_type = other RNA
accagcttctttccacagataacaaaaataccactttagatgttagacacac

SEQ ID NO: 3306 - RNA, 41 nt, synthetic construct
  source 1..41: mol_type = other RNA
gcttcttttcacagatccctttcgatgttagacacacagga

SEQ ID NO: 3307 - RNA, 31 nt, synthetic construct
  source 1..31: mol_type = other RNA
agaacgccggcttctttccacagattccttt

SEQ ID NO: 3308 - RNA, 42 nt, synthetic construct
  source 1..42: mol_type = other RNA
cacggagagaacaactagcttctttccccagattcctttcta

SEQ ID NO: 3309 - RNA, 31 nt, synthetic construct
  source 1..31: mol_type = other RNA
acggagagaagaccggcttctttccacagat

SEQ ID NO: 3310 - RNA, 41 nt, synthetic construct
  source 1..41: mol_type = other RNA
aaccaacacggagacaaaaccagcgtctttccacagattcc

SEQ ID NO: 3311 - RNA, 40 nt, synthetic construct
  source 1..40: mol_type = other RNA
gagaacaccagatttttccacagatgcacttctatgttag

SEQ ID NO: 3312 - RNA, 41 nt, synthetic construct
  source 1..41: mol_type = other RNA
accagcttctttccacagcttcatttcgatgttagacacac

SEQ ID NO: 3313 - RNA, 42 nt, synthetic construct
  source 1..42: mol_type = other RNA
gcttctttccacagatttttttcgatgtaaagacacacagga

SEQ ID NO: 3314 - RNA, 33 nt, synthetic construct
  source 1..33: mol_type = other RNA
acaccgtgctctttccacagaatgcactttcta

SEQ ID NO: 3315 - RNA, 31 nt, synthetic construct
  source 1..31: mol_type = other RNA
agaacaccagcgtctttccacgggttccttt

SEQ ID NO: 3316 - RNA, 31 nt, synthetic construct
  source 1..31: mol_type = other RNA
acggatagaacaccagcttcttcccacagat

SEQ ID NO: 3317 - RNA, 31 nt, synthetic construct
  source 1..31: mol_type = other RNA
agaacaccagcgtctctccacggtttccttt

SEQ ID NO: 3318 - RNA, 42 nt, synthetic construct
  source 1..42: mol_type = other RNA
gcttctttccacagattccattcgaatgttcgacacacagga

SEQ ID NO: 3319 - RNA, 41 nt, synthetic construct
  source 1..41: mol_type = other RNA
aaccaacacggagacagtaccagcgtctttgcgcagattcc

SEQ ID NO: 3320 - RNA, 41 nt, synthetic construct
  source 1..41: mol_type = other RNA
aaccaacaaaggaagaacacaataatctttccacagattcc

SEQ ID NO: 3321 - RNA, 31 nt, synthetic construct
  source 1..31: mol_type = other RNA
acggagaggaggcaagcttgcttccacagat

SEQ ID NO: 3322 - RNA, 31 nt, synthetic construct
  source 1..31: mol_type = other RNA
acaccagcttatttccacagatctgtttcta

SEQ ID NO: 3323 - RNA, 31 nt, synthetic construct
  source 1..31: mol_type = other RNA
acaccagcttcttttcacagatccgtttcta

SEQ ID NO: 3324 - RNA, 43 nt, synthetic construct
  source 1..43: mol_type = other RNA
accagcttaaatttccgcagattccgttcgatggtagacacac

SEQ ID NO: 3325 - RNA, 43 nt, synthetic construct; identical to SEQ ID NO: 3324
  source 1..43: mol_type = other RNA

SEQ ID NO: 3326 - RNA, 31 nt, synthetic construct
  source 1..31: mol_type = other RNA
agaacaccagcgtcttgccacaggctccttt

SEQ ID NO: 3327 - RNA, 31 nt, synthetic construct
  source 1..31: mol_type = other RNA
agaacgccagcttcttttcacagattccttt

SEQ ID NO: 3328 - RNA, 31 nt, synthetic construct
  source 1..31: mol_type = other RNA
agaaccccatcgtctctccacagattccttt

SEQ ID NO: 3329 - RNA, 31 nt, synthetic construct
  source 1..31: mol_type = other RNA
acggagagaacgactgcttctttccacagat

SEQ ID NO: 3330 - RNA, 41 nt, synthetic construct
  source 1..41: mol_type = other RNA
gcttctttccacagacgaattgagatgtgagacacacagga

SEQ ID NO: 3331 - RNA, 31 nt, synthetic construct
  source 1..31: mol_type = other RNA
acggagagggcacgagcttatttccacagat

SEQ ID NO: 3332 - RNA, 31 nt, synthetic construct
  source 1..31: mol_type = other RNA
acggagagaatatccgtgtctttccacagat

SEQ ID NO: 3333 - RNA, 41 nt, synthetic construct
  source 1..41: mol_type = other RNA
accagcttctttccacagattcctttcgatggtagacacac

SEQ ID NO: 3334 - RNA, 41 nt, synthetic construct
  source 1..41: mol_type = other RNA
gagaacaccagattcttttcacagattagtctctatgttag

SEQ ID NO: 3335 - RNA, 31 nt, synthetic construct
  source 1..31: mol_type = other RNA
agaacaccagcttctttccacgggttccttt

SEQ ID NO: 3336 - RNA, 31 nt, synthetic construct
  source 1..31: mol_type = other RNA
tctttccgcagatttctttcgatgttagaca

SEQ ID NO: 3337 - RNA, 41 nt, synthetic construct
  source 1..41: mol_type = other RNA
accagcttgtttccacagattcctttcgatgagagacacac

SEQ ID NO: 3338 - RNA, 41 nt, synthetic construct
  source 1..41: mol_type = other RNA
accagcttctttccacaggttactttagatgttagacacac

SEQ ID NO: 3339 - RNA, 31 nt, synthetic construct
  source 1..31: mol_type = other RNA
tctttccacagattccttcggtgattagaca

SEQ ID NO: 3340 - RNA, 31 nt, synthetic construct
  source 1..31: mol_type = other RNA
acaccagcttctttccacagatacctttcta

SEQ ID NO: 3341 - RNA, 41 nt, synthetic construct
  source 1..41: mol_type = other RNA
accagcttctctccacagatttttttcgatgtaagacacac

SEQ ID NO: 3342 - RNA, 31 nt, synthetic construct
  source 1..31: mol_type = other RNA
agaacacaataatctttccacagattccttt

SEQ ID NO: 3343 - RNA, 31 nt, synthetic construct
  source 1..31: mol_type = other RNA
acggagagtacaccagcttctttccacagat

SEQ ID NO: 3344 - RNA, 42 nt, synthetic construct
  source 1..42: mol_type = other RNA
accagcttctgttccacagattcctttcgatgttagacacac

SEQ ID NO: 3345 - RNA, 40 nt, synthetic construct
  source 1..40: mol_type = other RNA
cacggagagaataactgcgtcttttcacggatcctttcta

SEQ ID NO: 3346 - RNA, 41 nt, synthetic construct
  source 1..41: mol_type = other RNA
gcttctttccacaggttcctttcgatattaaacacacagga

SEQ ID NO: 3347 - RNA, 31 nt, synthetic construct
  source 1..31: mol_type = other RNA
tctttccacaggttcctttcgatgttagaca

SEQ ID NO: 3348 - RNA, 31 nt, synthetic construct
  source 1..31: mol_type = other RNA
acggagaggataccagcttcttttcacagat

SEQ ID NO: 3349 - RNA, 41 nt, synthetic construct
  source 1..41: mol_type = other RNA
gcttctttccacaattttttttcgatgttagacacacagga

SEQ ID NO: 3350 - RNA, 41 nt, synthetic construct
  source 1..41: mol_type = other RNA
accagcttctttccaccgattccttttgatattagacacac

SEQ ID NO: 3351 - RNA, 31 nt, synthetic construct
  source 1..31: mol_type = other RNA
acggagagaatcacagcttctttccacagat

SEQ ID NO: 3352 - RNA, 31 nt, synthetic construct
  source 1..31: mol_type = other RNA
agaacactatcttctttccacagattccttt

SEQ ID NO: 3353 - RNA, 31 nt, synthetic construct
  source 1..31: mol_type = other RNA
acggagagaacgccagattcttttcacagat

SEQ ID NO: 3354 - RNA, 51 nt, synthetic construct
  source 1..51: mol_type = other RNA
gcttctttccaaagtagaccgagatcgcattttggcgttagacacacagga

SEQ ID NO: 3355 - RNA, 31 nt, synthetic construct
  source 1..31: mol_type = other RNA
agaaccccaggttctttccacatattccttt

SEQ ID NO: 3356 - RNA, 31 nt, synthetic construct
  source 1..31: mol_type = other RNA
agaacaacagcatctttccacgggttccttt

SEQ ID NO: 3357 - RNA, 41 nt, synthetic construct
  source 1..41: mol_type = other RNA
cacggagagaataccagcttctttccacagattcctttcta

SEQ ID NO: 3358 - RNA, 40 nt, synthetic construct
  source 1..40: mol_type = other RNA
accagcttctttccacagattccattcgtgttagacacac

SEQ ID NO: 3359 - RNA, 31 nt, synthetic construct
  source 1..31: mol_type = other RNA
agaacacccccttccttccacagattccttt

SEQ ID NO: 3360 - RNA, 31 nt, synthetic construct
  source 1..31: mol_type = other RNA
agaacgtaagcttctctccacagattccttt

SEQ ID NO: 3361 - RNA, 41 nt, synthetic construct
  source 1..41: mol_type = other RNA
accagcttcttttcacagatccctttcgatgttagacacac

SEQ ID NO: 3362 - RNA, 41 nt, synthetic construct
  source 1..41: mol_type = other RNA
accagcttctttccacagtatactttcgatcttagacacac

SEQ ID NO: 3363 - RNA, 31 nt, synthetic construct
  source 1..31: mol_type = other RNA
acggagtgaacaccagctacttttcccagat

SEQ ID NO: 3364 - RNA, 41 nt, synthetic construct
  source 1..41: mol_type = other RNA
gcttctttccacagatcctattcgatgtttgacacacagga

SEQ ID NO: 3365 - RNA, 41 nt, synthetic construct
  source 1..41: mol_type = other RNA
gagaacaccagcgtctctccacacacccctttttatgttag

SEQ ID NO: 3366 - RNA, 41 nt, synthetic construct
  source 1..41: mol_type = other RNA
gagaacaccagcgtctttgcgcagtcgaatttctatgttag

SEQ ID NO: 3367 - RNA, 31 nt, synthetic construct
  source 1..31: mol_type = other RNA
acaccagttcctttccactgattcttttcta

SEQ ID NO: 3368 - RNA, 31 nt, synthetic construct
  source 1..31: mol_type = other RNA
agaacacaagcttgttcccacatattccttt

SEQ ID NO: 3369 - RNA, 41 nt, synthetic construct
  source 1..41: mol_type = other RNA
accagcttctttccacaggttcctttcgatattagacacac

SEQ ID NO: 3370 - RNA, 41 nt, synthetic construct
  source 1..41: mol_type = other RNA
accagcttctttccacgggttcctttcgatgttagacacac

SEQ ID NO: 3371 - RNA, 31 nt, synthetic construct
  source 1..31: mol_type = other RNA
acaccagcctctttccacagattccattcta

SEQ ID NO: 3372 - RNA, 42 nt, synthetic construct
  source 1..42: mol_type = other RNA
gagaacacaaagttctgttccacagattcctttctatgttag

SEQ ID NO: 3373 - RNA, 31 nt, synthetic construct
  source 1..31: mol_type = other RNA
acaccagcgtctttccacaggttcctttcta

SEQ ID NO: 3374 - RNA, 41 nt, synthetic construct
  source 1..41: mol_type = other RNA
gagaacaccggcttcttttcacagattcctttctatgttag

SEQ ID NO: 3375 - RNA, 41 nt, synthetic construct
  source 1..41: mol_type = other RNA
accagcttctttccacaggttgatttcgatgttagacacac

SEQ ID NO: 3376 - RNA, 31 nt, synthetic construct
  source 1..31: mol_type = other RNA
ccagcttctttccacagattacttgatatgt

SEQ ID NO: 3377 - RNA, 31 nt, synthetic construct
  source 1..31: mol_type = other RNA
agaacacaagcttctttccacagagtccttt

SEQ ID NO: 3378 - RNA, 31 nt, synthetic construct
  source 1..31: mol_type = other RNA
tctttccacggatcgctttcgatcttagaca

SEQ ID NO: 3379 - RNA, 41 nt, synthetic construct
  source 1..41: mol_type = other RNA
gcttctttccacagattccttcggtgattatgcacacagga

SEQ ID NO: 3380 - RNA, 31 nt, synthetic construct
  source 1..31: mol_type = other RNA
ccagctctattccaaagatgcttttctatgt

SEQ ID NO: 3381 - RNA, 31 nt, synthetic construct
  source 1..31: mol_type = other RNA
ccagcttctttccacagattccatcatatgt

SEQ ID NO: 3382 - RNA, 41 nt, synthetic construct
  source 1..41: mol_type = other RNA
accagcttctttccacagattccatcagatgttagacacac

SEQ ID NO: 3383 - RNA, 31 nt, synthetic construct
  source 1..31: mol_type = other RNA
ccagcttcttttcacagattccttggtatgt

SEQ ID NO: 3384 - RNA, 31 nt, synthetic construct
  source 1..31: mol_type = other RNA
acggagagtacaccggcttcttttcacagat

SEQ ID NO: 3385 - RNA, 31 nt, synthetic construct
  source 1..31: mol_type = other RNA
ccagcttctttccacagagtactttctatgt

SEQ ID NO: 3386 - RNA, 31 nt, synthetic construct
  source 1..31: mol_type = other RNA
acaccagcttctttccacaattttttttcta

SEQ ID NO: 3387 - RNA, 31 nt, synthetic construct
  source 1..31: mol_type = other RNA
acaccagcttccttccacagatgcctttcta

SEQ ID NO: 3388 - RNA, 40 nt, synthetic construct
  source 1..40: mol_type = other RNA
cacggagagaataaaagcttcttttcacagatcctttcta

SEQ ID NO: 3389 - RNA, 41 nt, synthetic construct
  source 1..41: mol_type = other RNA
accagcttctttccacagattccttttgatcttagacacac

SEQ ID NO: 3390 - RNA, 41 nt, synthetic construct
  source 1..41: mol_type = other RNA
gcttctttccacagattagtttcgatgttagcaacacagga

SEQ ID NO: 3391 - RNA, 31 nt, synthetic construct
  source 1..31: mol_type = other RNA
acggaaagaacacaagcttcttttcacagat

SEQ ID NO: 3392 - RNA, 41 nt, synthetic construct
  source 1..41: mol_type = other RNA
accagcttcttgccacaggctagtttcgatgttagacacac

SEQ ID NO: 3393 - RNA, 31 nt, synthetic construct
  source 1..31: mol_type = other RNA
acaccagcttctttccacagattcttttcta

SEQ ID NO: 3394 - RNA, 40 nt, synthetic construct
  source 1..40: mol_type = other RNA
accagctttttccacagatgcacttcgatattagacacac

SEQ ID NO: 3395 - RNA, 41 nt, synthetic construct
  source 1..41: mol_type = other RNA
accagcttcttgccacagatccgcatcgatgttagacacac

SEQ ID NO: 3396 - RNA, 31 nt, synthetic construct
  source 1..31: mol_type = other RNA
acaccagtttctttccacagactcttttcta

SEQ ID NO: 3397 - RNA, 31 nt, synthetic construct
  source 1..31: mol_type = other RNA
ccagcttctttccacagattccattctatgt

SEQ ID NO: 3398 - RNA, 31 nt, synthetic construct
  source 1..31: mol_type = other RNA
agaacagaagcctctttccacagattccttt

SEQ ID NO: 3399 - RNA, 41 nt, synthetic construct
  source 1..41: mol_type = other RNA
accagcttctttccacaattttttttcgatgttagacacac

SEQ ID NO: 3400 - RNA, 41 nt, synthetic construct
  source 1..41: mol_type = other RNA
gagaacacaagcttcttttcacagatccttttctatgttag

SEQ ID NO: 3401 - RNA, 31 nt, synthetic construct
  source 1..31: mol_type = other RNA
acaccagcgtctttgcgcagtcgaatttcta

SEQ ID NO: 3402 - RNA, 41 nt, synthetic construct
  source 1..41: mol_type = other RNA
accagcttctttccacatattcattcagatgttagacacac

SEQ ID NO: 3403 - RNA, 31 nt, synthetic construct
  source 1..31: mol_type = other RNA
acaccagcttctttccacagatttctttcta

SEQ ID NO: 3404 - RNA, 41 nt, synthetic construct
  source 1..41: mol_type = other RNA
accagcttctctccacggtttcctttcgatattagacacac

SEQ ID NO: 3405 - RNA, 30 nt, synthetic construct
  source 1..30: mol_type = other RNA
agaacttagcttctttccacagattccttt

SEQ ID NO: 3406 - RNA, 41 nt, synthetic construct
  source 1..41: mol_type = other RNA
accagcttctttccacagatcctttctgatgtcagacacac

SEQ ID NO: 3407 - RNA, 43 nt, synthetic construct
  source 1..43: mol_type = other RNA
gagaacaccaacctcttcttccacagacgaattgatatgttag

SEQ ID NO: 3408 - RNA, 43 nt, synthetic construct
  source 1..43: mol_type = other RNA
gagaacacaagcttgcttccaccgattcgtacatctatgttag

SEQ ID NO: 3409 - RNA, 31 nt, synthetic construct
  source 1..31: mol_type = other RNA
acaccagcttctttccacagcttcatttcta

SEQ ID NO: 3410 - RNA, 40 nt, synthetic construct
  source 1..40: mol_type = other RNA
cacggagaggataccagcttcttttcacagatcctttcta

SEQ ID NO: 3411 - RNA, 41 nt, synthetic construct
  source 1..41: mol_type = other RNA
accagcttcttttcactgattcctctcgctgttagacacac

SEQ ID NO: 3412 - RNA, 31 nt, synthetic construct
  source 1..31: mol_type = other RNA
agaacgactgcttcttttcacagatcccttt

SEQ ID NO: 3413 - RNA, 33 nt, synthetic construct
  source 1..33: mol_type = other RNA
agaacactagctaagcttttcccaggtgccttt

SEQ ID NO: 3414 - RNA, 31 nt, synthetic construct
  source 1..31: mol_type = other RNA
agaacaccaactttctttccacagatccttt

SEQ ID NO: 3415 - RNA, 41 nt, synthetic construct
  source 1..41: mol_type = other RNA
gcttcttttcacagatttctttcgatgttagacacacagga

SEQ ID NO: 3416 - RNA, 41 nt, synthetic construct
  source 1..41: mol_type = other RNA
gcttctttccacagattcctttcgatggtaaccacacagga

SEQ ID NO: 3417 - RNA, 31 nt, synthetic construct
  source 1..31: mol_type = other RNA
acggagagaacactagattcttttcacagat

SEQ ID NO: 3418 - RNA, 31 nt, synthetic construct
  source 1..31: mol_type = other RNA
agaacgcaagcttatttccacagattccttt

SEQ ID NO: 3419 - RNA, 31 nt, synthetic construct
  source 1..31: mol_type = other RNA
ccagcttgtttccacagattcctttctatgt

SEQ ID NO: 3420 - RNA, 32 nt, synthetic construct
  source 1..32: mol_type = other RNA
acaccaagttctgttccacagattcctttcta

SEQ ID NO: 3421 - RNA, 31 nt, synthetic construct
  source 1..31: mol_type = other RNA
acaccagcgtctttccacacattcctttcta

SEQ ID NO: 3422 - RNA, 41 nt, synthetic construct
  source 1..41: mol_type = other RNA
gcttctttccacagattcctctcgctgttgaccacacagga

SEQ ID NO: 3423 - RNA, 31 nt, synthetic construct
  source 1..31: mol_type = other RNA
acacccccttccttccacagattcctttcta

SEQ ID NO: 3424 - RNA, 43 nt, synthetic construct
  source 1..43: mol_type = other RNA
accagcttcttcttccacagacgaattgagatgtgagacacac

SEQ ID NO: 3425 - RNA, 31 nt, synthetic construct
  source 1..31: mol_type = other RNA
acggagacaaaaacagcatctttccacagat

SEQ ID NO: 3426 - RNA, 41 nt, synthetic construct
  source 1..41: mol_type = other RNA
gcttctttccacgggttcctttcgatgttagacacacagga

SEQ ID NO: 3427 - RNA, 42 nt, synthetic construct
  source 1..42: mol_type = other RNA
accagcttctttccacagattccattcgaatgttagacacac

SEQ ID NO: 3428 - RNA, 41 nt, synthetic construct
  source 1..41: mol_type = other RNA
gagaacacctgcttcttttcacagatcccactttatgttag

SEQ ID NO: 3429 - RNA, 28 nt, synthetic construct
  source 1..28: mol_type = other RNA
ccagcttcatttccacagctctctatgt

SEQ ID NO: 3430 - RNA, 41 nt, synthetic construct
  source 1..41: mol_type = other RNA
gcttctttccacagtttcttaaggatcttagacacacagga

SEQ ID NO: 3431 - RNA, 53 nt, synthetic construct
  source 1..53: mol_type = other RNA
aaccaacacataggccagacagagaaatacactagcttctttccacagattcc

SEQ ID NO: 3432 - RNA, 31 nt, synthetic construct
  source 1..31: mol_type = other RNA
acggagagaataactgcgtcttttcacagat

SEQ ID NO: 3433 - RNA, 37 nt, synthetic construct
  source 1..37: mol_type = other RNA
acggagagaacaccagagattgcttgtttccacagat

SEQ ID NO: 3434 - RNA, 31 nt, synthetic construct
  source 1..31: mol_type = other RNA
acaccagcatctttccacaggttcctttcta

SEQ ID NO: 3435 - RNA, 32 nt, synthetic construct
  source 1..32: mol_type = other RNA
acaccaactttctttccacagatccttttcta

SEQ ID NO: 3436 - RNA, 41 nt, synthetic construct
  source 1..41: mol_type = other RNA
accagcttctttccccagattccttacgatgttagacacac

SEQ ID NO: 3437 - RNA, 41 nt, synthetic construct
  source 1..41: mol_type = other RNA
cacggagagaaccccagcttcttttcactgattcctttcta

SEQ ID NO: 3438 - RNA, 32 nt, synthetic construct
  source 1..32: mol_type = other RNA
ccagctttctttccacagatcctttcttatgt

SEQ ID NO: 3439 - RNA, 48 nt, synthetic construct
  source 1..48: mol_type = other RNA
gagaacaccagaagcctttactagctgccggtctgccttctatgttag

SEQ ID NO: 3440 - RNA, 42 nt, synthetic construct
  source 1..42: mol_type = other RNA
gcttctttccacagcttcatttcgatgttggaacacacagga

SEQ ID NO: 3441 - RNA, 31 nt, synthetic construct
  source 1..31: mol_type = other RNA
acggagacaataccagcgtctttccacagat

SEQ ID NO: 3442 - RNA, 41 nt, synthetic construct
  source 1..41: mol_type = other RNA
accagcttcactccacagattactttcgctaatagacacac

SEQ ID NO: 3443 - RNA, 40 nt, synthetic construct
  source 1..40: mol_type = other RNA
accagcttctttccacagatccatttgatgttagacacac

SEQ ID NO: 3444 - RNA, 31 nt, synthetic construct
  source 1..31: mol_type = other RNA
acggagagaaccccagattcttttcacagat

SEQ ID NO: 3445 - RNA, 41 nt, synthetic construct
  source 1..41: mol_type = other RNA
cacggagagaacaccaggtctattccaaagatgcctttcta

SEQ ID NO: 3446 - RNA, 33 nt, synthetic construct
  source 1..33: mol_type = other RNA
agaacgccagattcttttcacagccattccttt

SEQ ID NO: 3447 - RNA, 31 nt, synthetic construct
  source 1..31: mol_type = other RNA
tctttccacagatgcacttcgatattagaca

SEQ ID NO: 3448 - RNA, 31 nt, synthetic construct
  source 1..31: mol_type = other RNA
agaacaacagcatctttccacaggttccttt

SEQ ID NO: 3449 - RNA, 41 nt, synthetic construct
  source 1..41: mol_type = other RNA
accagcttcttttcacagatccgtttcgatgttagacacac

SEQ ID NO: 3450 - RNA, 34 nt, synthetic construct
  source 1..34: mol_type = other RNA
acaccggcttctgttccacagataaaactttcta

SEQ ID NO: 3451 - RNA, 41 nt, synthetic construct
  source 1..41: mol_type = other RNA
gcttctttccagagaatcatttcgatgtttgaaacacagga

SEQ ID NO: 3452 - RNA, 31 nt, synthetic construct
  source 1..31: mol_type = other RNA
acaccggcttatatccagagaatcatttcta

SEQ ID NO: 3453 - RNA, 47 nt, synthetic construct
  source 1..47: mol_type = other RNA
gagaacactctcttccaaagtagaccgagatcgcatttttatgttag

SEQ ID NO: 3454 - RNA, 42 nt, synthetic construct
  source 1..42: mol_type = other RNA
accagcttctttccacagattccttaaagatgttagacacac

SEQ ID NO: 3455 - RNA, 31 nt, synthetic construct
  source 1..31: mol_type = other RNA
acacccacttcttagcacagattcctttcta

SEQ ID NO: 3456 - RNA, 42 nt, synthetic construct
  source 1..42: mol_type = other RNA
accagcttcttttcacagacttgtttcgatgcatagacacac

SEQ ID NO: 3457 - RNA, 41 nt, synthetic construct
  source 1..41: mol_type = other RNA
accagcttctttccacagattagactcgctgttagacacac

SEQ ID NO: 3458 - RNA, 41 nt, synthetic construct
  source 1..41: mol_type = other RNA
gcttctttccacagattccatcagatgttgcgcacacagga

SEQ ID NO: 3459 - RNA, 31 nt, synthetic construct
  source 1..31: mol_type = other RNA
tctttccacatattcattcagatgttagaca

SEQ ID NO: 3460 - RNA, 41 nt, synthetic construct
  source 1..41: mol_type = other RNA
gcttcttttcacagattcctttcgatgtcagacacacagga

SEQ ID NO: 3461 - RNA, 31 nt, synthetic construct
  source 1..31: mol_type = other RNA
acaccagcttctttccacagagtactttcta

SEQ ID NO: 3462 - RNA, 41 nt, synthetic construct
  source 1..41: mol_type = other RNA
gcttctttccacacattcctttcgataatagacacacagga

SEQ ID NO: 3463 - RNA, 41 nt, synthetic construct
  source 1..41: mol_type = other RNA
accagcttctttccacagattccttacgatgtcagacacac

SEQ ID NO: 3464 - RNA, 31 nt, synthetic construct
  source 1..31: mol_type = other RNA
ccagcttgtttccacagatgaatttctatgt

SEQ ID NO: 3465 - RNA, 41 nt, synthetic construct
  source 1..41: mol_type = other RNA
accagcttgtttccacagatgaatttcggcgttagacacac

SEQ ID NO: 3466 - RNA, 33 nt, synthetic construct
  source 1..33: mol_type = other RNA
acaccaacctcttcttccacagacgaatttcta

SEQ ID NO: 3467 - RNA, 47 nt, synthetic construct
  source 1..47: mol_type = other RNA
accagcttctttactagctgccggtctgccttcgatgttagacacac

SEQ ID NO: 3468 - RNA, 33 nt, synthetic construct
  source 1..33: mol_type = other RNA
acaccagctaggctttccacagattcttttcta

SEQ ID NO: 3469 - RNA, 31 nt, synthetic construct
  source 1..31: mol_type = other RNA
ccagcgtcttcccacacattgctttctatgt

SEQ ID NO: 3470 - RNA, 41 nt, synthetic construct
  source 1..41: mol_type = other RNA
accagcttcttttcacagattccttacgatgttagacacac

SEQ ID NO: 3471 - RNA, 52 nt, synthetic construct
  source 1..52: mol_type = other RNA
accagcttctttccaccgattccaccaaaaataccatcgaggttagacacac

SEQ ID NO: 3472 - RNA, 41 nt, synthetic construct
  source 1..41: mol_type = other RNA
gcttcttttcacagacttgtttcgatgcatagcacacagga

SEQ ID NO: 3473 - RNA, 31 nt, synthetic construct
  source 1..31: mol_type = other RNA
ccagcttctttccccagattccttactatgt

SEQ ID NO: 3474 - RNA, 41 nt, synthetic construct
  source 1..41: mol_type = other RNA
gcttctttccacagattcttttcgatgtcaaccacacagga

SEQ ID NO: 3475 - RNA, 41 nt, synthetic construct
  source 1..41: mol_type = other RNA
accagcttctttccacagatttcttgcgatgtgagacacac

SEQ ID NO: 3476 - RNA, 41 nt, synthetic construct
  source 1..41: mol_type = other RNA
gcttctttccacagatccctctcgatggcatacacacagga

SEQ ID NO: 3477 - RNA, 33 nt, synthetic construct
  source 1..33: mol_type = other RNA
agaacgggggcagaaatttccgcagattccttt

SEQ ID NO: 3478 - RNA, 33 nt, synthetic construct; identical to SEQ ID NO: 3477
  source 1..33: mol_type = other RNA

SEQ ID NO: 3479 - RNA, 41 nt, synthetic construct
  source 1..41: mol_type = other RNA
cacggagacgaaaccgtgctctttccacagaatcctttcta

SEQ ID NO: 3480 - RNA, 43 nt, synthetic construct
  source 1..43: mol_type = other RNA
gcttctttccacagaatgcacttgagatgttagccacacagga

SEQ ID NO: 3481 - RNA, 43 nt, synthetic construct
  source 1..43: mol_type = other RNA
accagcttctttccacagaatgcacttgagatgttagacacac

SEQ ID NO: 3482 - RNA, 31 nt, synthetic construct
  source 1..31: mol_type = other RNA
ccagcttatttccacagattcctttctatgt

SEQ ID NO: 3483 - RNA, 41 nt, synthetic construct
  source 1..41: mol_type = other RNA
gcttcttttcacagatccgtttcgatgttaggcacacagga

SEQ ID NO: 3484 - RNA, 41 nt, synthetic construct
  source 1..41: mol_type = other RNA
gcttctttccacacaccccttttgatgatagacacacagga

SEQ ID NO: 3485 - RNA, 30 nt, synthetic construct
  source 1..30: mol_type = other RNA
acaccagcttcttttcacagatcctttcta

SEQ ID NO: 3486 - RNA, 41 nt, synthetic construct
  source 1..41: mol_type = other RNA
accagcttcttttcacagattccttgggatgttagacacac

SEQ ID NO: 3487 - RNA, 27 nt, synthetic construct
  source 1..27: mol_type = other RNA
acggagagaacactctcttccacagat

SEQ ID NO: 3488 - RNA, 31 nt, synthetic construct
  source 1..31: mol_type = other RNA
acaccagctacttttcccaggttcttttcta

SEQ ID NO: 3489 - RNA, 41 nt, synthetic construct
  source 1..41: mol_type = other RNA
accagcttctttccacagattacttgagatgtgagacacac

SEQ ID NO: 3490 - RNA, 31 nt, synthetic construct
  source 1..31: mol_type = other RNA
tcttttcactgattcctctcgctgttagaca

SEQ ID NO: 3491 - RNA, 42 nt, synthetic construct
  source 1..42: mol_type = other RNA
aaccaacacggagacagcaccagcgtcatttccacagattcc

SEQ ID NO: 3492 - RNA, 32 nt, synthetic construct
  source 1..32: mol_type = other RNA
ccagcgtcatttccacacattcctttctatgt

SEQ ID NO: 3493 - RNA, 41 nt, synthetic construct
  source 1..41: mol_type = other RNA
gcttcttttcacggattttcgctgtcacatagtacacagga

SEQ ID NO: 3494 - RNA, 33 nt, synthetic construct
  source 1..33: mol_type = other RNA
agaacaccaacctcttcttccacagacgccttt

SEQ ID NO: 3495 - RNA, 31 nt, synthetic construct
  source 1..31: mol_type = other RNA
acaccagcttctttccacgggttcatttcta

SEQ ID NO: 3496 - RNA, 31 nt, synthetic construct
  source 1..31: mol_type = other RNA
agaacacaagcttcttttcacagattccttt

SEQ ID NO: 3497 - RNA, 41 nt, synthetic construct
  source 1..41: mol_type = other RNA
accagcttttttccacgagttctattcgatgttagacacac

SEQ ID NO: 3498 - RNA, 30 nt, synthetic construct
  source 1..30: mol_type = other RNA
acaccagctactttccacagagtcgttcta

SEQ ID NO: 3499 - RNA, 41 nt, synthetic construct
  source 1..41: mol_type = other RNA
gcttcttttcacagattccttacgatgttgggcacacagga

SEQ ID NO: 3500 - RNA, 41 nt, synthetic construct
  source 1..41: mol_type = other RNA
cacggagaggacaccagcgtctttccatagattcctttcta

SEQ ID NO: 3501 - RNA, 31 nt, synthetic construct
  source 1..31: mol_type = other RNA
agaacaccggcttcttttcacagattccttt

SEQ ID NO: 3502 - RNA, 31 nt, synthetic construct
  source 1..31: mol_type = other RNA
ccagcgtctctccacacacccctttttatgt

SEQ ID NO: 3503 - RNA, 41 nt, synthetic construct
  source 1..41: mol_type = other RNA
gcttctttccacgtgttctattcgatgttagacacacagga

SEQ ID NO: 3504 - RNA, 31 nt, synthetic construct
  source 1..31: mol_type = other RNA
acggagagtacatcggcttatatccacagat

SEQ ID NO: 3505 - RNA, 31 nt, synthetic construct
  source 1..31: mol_type = other RNA
acaccagcgtctttccacagtatactttcta

SEQ ID NO: 3506 - RNA, 41 nt, synthetic construct
  source 1..41: mol_type = other RNA
accagcttcgttccgcagatttctttcgatgttagacacac

SEQ ID NO: 3507 - RNA, 41 nt, synthetic construct
  source 1..41: mol_type = other RNA
accagcttctttccacagattccttcggtgattagacacac

SEQ ID NO: 3508 - RNA, 30 nt, synthetic construct
  source 1..30: mol_type = other RNA
agaacaccaaagtttttccacgtgtccttt

SEQ ID NO: 3509 - RNA, 42 nt, synthetic construct
  source 1..42: mol_type = other RNA
accagcttcatttccacacattcctttcgataatagacacac

SEQ ID NO: 3510 - RNA, 41 nt, synthetic construct
  source 1..41: mol_type = other RNA
gagaacaccggcttatatccagagaatcatttctatgttag

SEQ ID NO: 3511 - RNA, 31 nt, synthetic construct
  source 1..31: mol_type = other RNA
acacccgtgtctttccacagattcctttcta

SEQ ID NO: 3512 - RNA, 40 nt, synthetic construct
  source 1..40: mol_type = other RNA
gcttcttttcacagccatttatcgattaaggcacacagga

SEQ ID NO: 3513 - RNA, 41 nt, synthetic construct
  source 1..41: mol_type = other RNA
gcttctttccacagatccgcatcgatgtttaacacacagga

SEQ ID NO: 3514 - RNA, 31 nt, synthetic construct
  source 1..31: mol_type = other RNA
acaccagcttctctccacagatttttttcta

SEQ ID NO: 3515 - RNA, 41 nt, synthetic construct
  source 1..41: mol_type = other RNA
accagcttgttcccacatattaatttcgatgtcagacacac

SEQ ID NO: 3516 - RNA, 31 nt, synthetic construct
  source 1..31: mol_type = other RNA
acggagacagcaacagcatctttccacagat

SEQ ID NO: 3517 - RNA, 31 nt, synthetic construct
  source 1..31: mol_type = other RNA
ccagcctctttccacagattccattctatgt

SEQ ID NO: 3518 - RNA, 31 nt, synthetic construct
  source 1..31: mol_type = other RNA
agaaccccagcttcttttcactgattccttt

SEQ ID NO: 3519 - RNA, 41 nt, synthetic construct
  source 1..41: mol_type = other RNA
gcttctttccaaagatgcttttcgatgttagacacacagga

SEQ ID NO: 3520 - RNA, 31 nt, synthetic construct
  source 1..31: mol_type = other RNA
agaacaccagcgtctttgcgcagtcgccttt

SEQ ID NO: 3521 - RNA, 31 nt, synthetic construct
  source 1..31: mol_type = other RNA
tctttccacagattccttttgatcttagaca

SEQ ID NO: 3522 - RNA, 31 nt, synthetic construct
  source 1..31: mol_type = other RNA
ccagcatctttccacgggttcctttctatgt

SEQ ID NO: 3523 - RNA, 31 nt, synthetic construct
  source 1..31: mol_type = other RNA
acaccaacgtctctccacagatttctttcta

SEQ ID NO: 3524 - RNA, 41 nt, synthetic construct
  source 1..41: mol_type = other RNA
gcttcttttcacagattccttttgatcttaagcacacagga

SEQ ID NO: 3525 - RNA, 30 nt, synthetic construct
  source 1..30: mol_type = other RNA
agaacgccagatttttccacagatgccttt

SEQ ID NO: 3526 - RNA, 37 nt, synthetic construct
  source 1..37: mol_type = other RNA
agaacaccagagattgcttgtttccacagatgccttt

SEQ ID NO: 3527 - RNA, 41 nt, synthetic construct
  source 1..41: mol_type = other RNA
gcttctttccacagattcctttcgatgagaaccacacagga

SEQ ID NO: 3528 - RNA, 31 nt, synthetic construct
  source 1..31: mol_type = other RNA
acacccgcttgtttccacagattcctttcta

SEQ ID NO: 3529 - RNA, 41 nt, synthetic construct
  source 1..41: mol_type = other RNA
accagcttcttttcacagatcaatttcgatgttagacacac

SEQ ID NO: 3530 - RNA, 41 nt, synthetic construct
  source 1..41: mol_type = other RNA
gcttcttttcacagatcccacttgctgttagttacacagga

SEQ ID NO: 3531 - RNA, 31 nt, synthetic construct
  source 1..31: mol_type = other RNA
acggagagaataaaagcttcttttcacagat

SEQ ID NO: 3532 - RNA, 31 nt, synthetic construct
  source 1..31: mol_type = other RNA
ccagcttctttccaccgattcctttttatgt

SEQ ID NO: 3533 - RNA, 41 nt, synthetic construct
  source 1..41: mol_type = other RNA
gcttctttccacacattgctttcgataatagacacacagga

SEQ ID NO: 3534 - RNA, 30 nt, synthetic construct
  source 1..30: mol_type = other RNA
acaccagattcttttcacagattccttcta

SEQ ID NO: 3535 - RNA, 44 nt, synthetic construct
  source 1..44: mol_type = other RNA
accagctttgcttccaccgattcgtacatcgcggttagacacac

SEQ ID NO: 3536 - RNA, 31 nt, synthetic construct
  source 1..31: mol_type = other RNA
agaacaccgtgctctttccacagaatccttt

SEQ ID NO: 3537 - RNA, 31 nt, synthetic construct
  source 1..31: mol_type = other RNA
agaacattcacctcttatcgcagattccttt

SEQ ID NO: 3538 - RNA, 30 nt, synthetic construct
  source 1..30: mol_type = other RNA
agaacaccagcttcttttcacagatccttt

SEQ ID NO: 3539 - RNA, 31 nt, synthetic construct
  source 1..31: mol_type = other RNA
acaccggcttctttccacagattagtttcta

SEQ ID NO: 3540 - RNA, 41 nt, synthetic construct
  source 1..41: mol_type = other RNA
accagcttctctccacacaccccttttgatgatagacacac

SEQ ID NO: 3541 - RNA, 31 nt, synthetic construct
  source 1..31: mol_type = other RNA
tctttccacaattttttttcgatgttagaca

SEQ ID NO: 3542 - RNA, 41 nt, synthetic construct
  source 1..41: mol_type = other RNA
gcttcttttcacagatccttttcgatgtcaggcacacagga

SEQ ID NO: 3543 - RNA, 31 nt, synthetic construct
  source 1..31: mol_type = other RNA
acaccagcgtcttgccacaggctagtttcta

SEQ ID NO: 3544 - RNA, 31 nt, synthetic construct
  source 1..31: mol_type = other RNA
tctttccacagattcttttcgatgttagaca

SEQ ID NO: 3545 - RNA, 30 nt, synthetic construct
  source 1..30: mol_type = other RNA
acggagagactgccagatttttccacagat

SEQ ID NO: 3546 - RNA, 30 nt, synthetic construct
  source 1..30: mol_type = other RNA
ccagctttttccacagatgcacttctatgt

SEQ ID NO: 3547 - RNA, 41 nt, synthetic construct
  source 1..41: mol_type = other RNA
accagcttcttttcccaggtgcctatcgatgttagacacac

SEQ ID NO: 3548 - RNA, 47 nt, synthetic construct
  source 1..47: mol_type = other RNA
gcttctttactagctgccggtctgccttcgatgttagacacacagga

SEQ ID NO: 3549 - RNA, 30 nt, synthetic construct
  source 1..30: mol_type = other RNA
acaccagcttctttccacagttcctttcta

SEQ ID NO: 3550 - RNA, 34 nt, synthetic construct
  source 1..34: mol_type = other RNA
acggagagaaatacactagcttctttccacagat

SEQ ID NO: 3551 - RNA, 34 nt, synthetic construct
  source 1..34: mol_type = other RNA
agaactacactagcttctttccacaatttccttt

SEQ ID NO: 3552 - RNA, 41 nt, synthetic construct
  source 1..41: mol_type = other RNA
gcttctttccacagataaaacttgataattgacacacagga

SEQ ID NO: 3553 - RNA, 41 nt, synthetic construct
  source 1..41: mol_type = other RNA
gcttctttccacagattactttcgctaatagacacacagga

SEQ ID NO: 3554 - RNA, 41 nt, synthetic construct
  source 1..41: mol_type = other RNA
gcttctttccacagatgaatttcggcgttaggcacacagga

SEQ ID NO: 3555 - RNA, 31 nt, synthetic construct
  source 1..31: mol_type = other RNA
acaccagcctctttccacagattcctttcta

SEQ ID NO: 3556 - RNA, 31 nt, synthetic construct
  source 1..31: mol_type = other RNA
acaccagcttgttcccacatattaatttcta

SEQ ID NO: 3557 - RNA, 31 nt, synthetic construct
  source 1..31: mol_type = other RNA
agaacgcaagcttgcttccaccgattccttt

SEQ ID NO: 3558 - RNA, 31 nt, synthetic construct
  source 1..31: mol_type = other RNA
ccagcttctttccacagattaatttctatgt

SEQ ID NO: 3559 - RNA, 31 nt, synthetic construct
  source 1..31: mol_type = other RNA
acaccggcttcttttcacagattcctttcta

SEQ ID NO: 3560 - RNA, 46 nt, synthetic construct
  source 1..46: mol_type = other RNA
aaccaacacgggagggaaagaacacaagcttcttttcacagattcc

SEQ ID NO: 3561 - RNA, 31 nt, synthetic construct
  source 1..31: mol_type = other RNA
tctttccacgagttctattcgatgttagaca

SEQ ID NO: 3562 - RNA, 31 nt, synthetic construct
  source 1..31: mol_type = other RNA
ccagcttcttttcacagatcccactttatgt

SEQ ID NO: 3563 - RNA, 31 nt, synthetic construct
  source 1..31: mol_type = other RNA
tctttccgcagatgccttgcggcgttagaca

SEQ ID NO: 3564 - RNA, 41 nt, synthetic construct
  source 1..41: mol_type = other RNA
accagcttgtttccgcagatgccttgcggcgttagacacac

SEQ ID NO: 3565 - RNA, 31 nt, synthetic construct
  source 1..31: mol_type = other RNA
ccagcgtcttgccacaggctagtttctatgt

SEQ ID NO: 3566 - RNA, 31 nt, synthetic construct
  source 1..31: mol_type = other RNA
ccagcttcttttcacagccatttatctatgt

SEQ ID NO: 3567 - RNA, 32 nt, synthetic construct
  source 1..32: mol_type = other RNA
acggaaagaactccgggcttcttgccacagat

SEQ ID NO: 3568 - RNA, 31 nt, synthetic construct
  source 1..31: mol_type = other RNA
acaccagtttctttccacagattctcttcta

SEQ ID NO: 3569 - RNA, 31 nt, synthetic construct
  source 1..31: mol_type = other RNA
tctttgcacagattcctttcgatgttagaca

SEQ ID NO: 3570 - RNA, 41 nt, synthetic construct
  source 1..41: mol_type = other RNA
gcttcttttcgcagattcatttcgatgttaattacacagga

SEQ ID NO: 3571 - RNA, 31 nt, synthetic construct
  source 1..31: mol_type = other RNA
acaccagcgtctctccacacacccctttcta

SEQ ID NO: 3572 - RNA, 41 nt, synthetic construct
  source 1..41: mol_type = other RNA
accagcttcttcccacacattgctttcgataatagacacac

SEQ ID NO: 3573 - RNA, 27 nt, synthetic construct
  source 1..27: mol_type = other RNA
tctttccacagctctcgatgttagaca

SEQ ID NO: 3574 - RNA, 43 nt, synthetic construct
  source 1..43: mol_type = other RNA
gagaacacgggcagaaatttccgcagattccgttctatgttag

SEQ ID NO: 3575 - RNA, 43 nt, synthetic construct; identical to SEQ ID NO: 3574
  source 1..43: mol_type = other RNA

SEQ ID NO: 3576 - RNA, 41 nt, synthetic construct
  source 1..41: mol_type = other RNA
gcttctttgcgcagtcgaatttcgatcttagacacacagga

SEQ ID NO: 3577 - RNA, 31 nt, synthetic construct
  source 1..31: mol_type = other RNA
tctttccacagattcctctcgctgttagaca

SEQ ID NO: 3578 - RNA, 31 nt, synthetic construct
  source 1..31: mol_type = other RNA
acaccagcttctttccacagtttcttttcta

SEQ ID NO: 3579 - RNA, 42 nt, synthetic construct
  source 1..42: mol_type = other RNA
gcttctttcccacatattaatttcgatgtctgttacacagga

SEQ ID NO: 3580 - RNA, 33 nt, synthetic construct
  source 1..33: mol_type = other RNA
ccagcttgcttccaccgattcgtacatctatgt

SEQ ID NO: 3581 - RNA, 31 nt, synthetic construct
  source 1..31: mol_type = other RNA
acaccagcatctttccacgggttcctttcta

SEQ ID NO: 3582 - RNA, 31 nt, synthetic construct
  source 1..31: mol_type = other RNA
ccagcttctttccacagatttctttctatgt

SEQ ID NO: 3583 - RNA, 31 nt, synthetic construct
  source 1..31: mol_type = other RNA
ccagcttctttccacagactcttttctatgt

SEQ ID NO: 3584 - RNA, 31 nt, synthetic construct
  source 1..31: mol_type = other RNA
acaccggcttctttccacagattactttcta

SEQ ID NO: 3585 - RNA, 31 nt, synthetic construct
  source 1..31: mol_type = other RNA
tctttccacagcctcttttcgatgatagaca

SEQ ID NO: 3586 - RNA, 41 nt, synthetic construct
  source 1..41: mol_type = other RNA
cacggagacagtaccagcgtctttgcgcagtcgcctttcta

SEQ ID NO: 3587 - RNA, 31 nt, synthetic construct
  source 1..31: mol_type = other RNA
acaccagcttcactccacagattactttcta

SEQ ID NO: 3588 - RNA, 31 nt, synthetic construct
  source 1..31: mol_type = other RNA
ccagcttctttccacagattcttttctatgt

SEQ ID NO: 3589 - RNA, 43 nt, synthetic construct
  source 1..43: mol_type = other RNA
accagcttctttccacagataccttcctcgaagttagacacac

SEQ ID NO: 3590 - RNA, 31 nt, synthetic construct
  source 1..31: mol_type = other RNA
agaacgccatcttcttttcacagattccttt

SEQ ID NO: 3591 - RNA, 33 nt, synthetic construct
  source 1..33: mol_type = other RNA
tctttccacagaatgcacttgagatgttagaca

SEQ ID NO: 3592 - RNA, 34 nt, synthetic construct
  source 1..34: mol_type = other RNA
ccagcgctctttccacagaatgcacttgatatgt

SEQ ID NO: 3593 - RNA, 41 nt, synthetic construct
  source 1..41: mol_type = other RNA
accagcttcttagcacagattcctttcgatgttagacacac

SEQ ID NO: 3594 - RNA, 31 nt, synthetic construct
  source 1..31: mol_type = other RNA
acaccagcttatttccacagattcctttcta

SEQ ID NO: 3595 - RNA, 41 nt, synthetic construct
  source 1..41: mol_type = other RNA
gcttctttccgcagatttctttcgatgtttgacacacagga

SEQ ID NO: 3596 - RNA, 42 nt, synthetic construct
  source 1..42: mol_type = other RNA
ccagcctctttccaccgattccaccaaaaataccatctatgt

SEQ ID NO: 3597 - RNA, 31 nt, synthetic construct
  source 1..31: mol_type = other RNA
ccagcttcttttcacagattcctttctatgt

SEQ ID NO: 3598 - RNA, 31 nt, synthetic construct
  source 1..31: mol_type = other RNA
tctttccacagattagtttcgatgttagaca

SEQ ID NO: 3599 - RNA, 31 nt, synthetic construct
  source 1..31: mol_type = other RNA
ccagcttctttccacagattagactctatgt

SEQ ID NO: 3600 - RNA, 30 nt, synthetic construct
  source 1..30: mol_type = other RNA
acaccagatttttccacagatgcacttcta

SEQ ID NO: 3601 - RNA, 31 nt, synthetic construct
  source 1..31: mol_type = other RNA
agaacaccggcttcttttcacagatcccttt

SEQ ID NO: 3602 - RNA, 31 nt, synthetic construct
  source 1..31: mol_type = other RNA
acaccagcttctttccacagattaatttcta

SEQ ID NO: 3603 - RNA, 31 nt, synthetic construct
  source 1..31: mol_type = other RNA
tctttccacagattcctttcgatgttagaca

SEQ ID NO: 3604 - RNA, 31 nt, synthetic construct
  source 1..31: mol_type = other RNA
agaacaccagctacttttcccaggttccttt

SEQ ID NO: 3605 - RNA, 41 nt, synthetic construct
  source 1..41: mol_type = other RNA
aaccaacagggagacaacaccagcgtctctccacagattcc

SEQ ID NO: 3606 - RNA, 31 nt, synthetic construct
  source 1..31: mol_type = other RNA
acggatagacaactcacttcttatcacagat

SEQ ID NO: 3607 - RNA, 31 nt, synthetic construct
  source 1..31: mol_type = other RNA
tctttccacagatccctctcgatggcagaca

SEQ ID NO: 3608 - RNA, 41 nt, synthetic construct
  source 1..41: mol_type = other RNA
gcttctttccaccgattccttttgatattccacacacagga

SEQ ID NO: 3609 - RNA, 37 nt, synthetic construct
  source 1..37: mol_type = other RNA
gcttctttccacagctctcgatgttagtcacacagga

SEQ ID NO: 3610 - RNA, 31 nt, synthetic construct
  source 1..31: mol_type = other RNA
tctttccacacattcctttcgatgatagaca

SEQ ID NO: 3611 - RNA, 42 nt, synthetic construct
  source 1..42: mol_type = other RNA
accagcttctattccaaagatgcttttcgatgttagacacac

SEQ ID NO: 3612 - RNA, 31 nt, synthetic construct
  source 1..31: mol_type = other RNA
ccagcttccttccacagattcctctctatgt

SEQ ID NO: 3613 - RNA, 31 nt, synthetic construct
  source 1..31: mol_type = other RNA
tctttccacagattccttacgatgttagaca

SEQ ID NO: 3614 - RNA, 41 nt, synthetic construct
  source 1..41: mol_type = other RNA
gagaacaccagattcttttcacagccatttatctatgttag

SEQ ID NO: 3615 - RNA, 31 nt, synthetic construct
  source 1..31: mol_type = other RNA
acaccgggcttcttgccacagatccgttcta

SEQ ID NO: 3616 - RNA, 31 nt, synthetic construct
  source 1..31: mol_type = other RNA
acaccagcctctttccacagattactttcta

SEQ ID NO: 3617 - RNA, 39 nt, synthetic construct
  source 1..39: mol_type = other RNA
tcttttcacagattagtctcgtcacccccatgttagaca

SEQ ID NO: 3618 - RNA, 42 nt, synthetic construct
  source 1..42: mol_type = other RNA
acacccgcttctttccacagataacaaaaataccactttcta

SEQ ID NO: 3619 - RNA, 30 nt, synthetic construct
  source 1..30: mol_type = other RNA
tctttccacagttcctttcgatgttagaca

SEQ ID NO: 3620 - RNA, 31 nt, synthetic construct
  source 1..31: mol_type = other RNA
tctttccacagagtactttcgatgttagaca

SEQ ID NO: 3621 - RNA, 31 nt, synthetic construct
  source 1..31: mol_type = other RNA
tctttccacagattccttacgatgtcagaca

SEQ ID NO: 3622 - RNA, 31 nt, synthetic construct
  source 1..31: mol_type = other RNA
ccagcttatctccacagatccctctctatgt

SEQ ID NO: 3623 - RNA, 29 nt, synthetic construct
  source 1..29: mol_type = other RNA
acaccagcttcatttccacagctcttcta

SEQ ID NO: 3624 - RNA, 47 nt, synthetic construct
  source 1..47: mol_type = other RNA
gagaacaccagaggttgcttgtttccgcagatgccttgctatgttag

SEQ ID NO: 3625 - RNA, 31 nt, synthetic construct
  source 1..31: mol_type = other RNA
agaaccccagattcttttcacagattccttt

SEQ ID NO: 3626 - RNA, 50 nt, synthetic construct
  source 1..50: mol_type = other RNA
accagcttcttccaaagtagaccgagatcgcattttggcgttagacacac

SEQ ID NO: 3627 - RNA, 41 nt, synthetic construct
  source 1..41: mol_type = other RNA
accagcttatttccacagatctgtttcgttgggagacacac

SEQ ID NO: 3628 - RNA, 30 nt, synthetic construct
  source 1..30: mol_type = other RNA
ccagcctctttccacagattccttctatgt

SEQ ID NO: 3629 - RNA, 31 nt, synthetic construct
  source 1..31: mol_type = other RNA
acggagagaacgactgcttcttttcacagat

SEQ ID NO: 3630 - RNA, 30 nt, synthetic construct
  source 1..30: mol_type = other RNA
acggagggataccagcttatctccacagat

SEQ ID NO: 3631 - RNA, 31 nt, synthetic construct
  source 1..31: mol_type = other RNA
ccagcttctttccacagattccttaatatgt

SEQ ID NO: 3632 - RNA, 31 nt, synthetic construct
  source 1..31: mol_type = other RNA
tctttccacagatctgtttcgttgggagaca

SEQ ID NO: 3633 - RNA, 41 nt, synthetic construct
  source 1..41: mol_type = other RNA
gcttctttccacagatctgtttcgttgggatacacacagga

SEQ ID NO: 3634 - RNA, 31 nt, synthetic construct
  source 1..31: mol_type = other RNA
ccagcgtctttccacgggttcctttctatgt

SEQ ID NO: 3635 - RNA, 31 nt, synthetic construct
  source 1..31: mol_type = other RNA
ccagcttctttccacagattagtttctatgt

SEQ ID NO: 3636 - RNA, 34 nt, synthetic construct
  source 1..34: mol_type = other RNA
acaccagcttctttccacaggggacacctttcta

SEQ ID NO: 3637 - RNA, 41 nt, synthetic construct
  source 1..41: mol_type = other RNA
gcttcttttcactgattcctctcgctgttaggcacacagga

SEQ ID NO: 3638 - RNA, 41 nt, synthetic construct
  source 1..41: mol_type = other RNA
accagcttttttccacggatcgctttcgatcttagacacac

SEQ ID NO: 3639 - RNA, 41 nt, synthetic construct
  source 1..41: mol_type = other RNA
gagaacactcacttcttatcacagatttctttctatgttag

SEQ ID NO: 3640 - RNA, 31 nt, synthetic construct
  source 1..31: mol_type = other RNA
ccagcgtttttccacgtgttctattctatgt

SEQ ID NO: 3641 - RNA, 31 nt, synthetic construct
  source 1..31: mol_type = other RNA
ccagcttccttccacagatgcctttctatgt

SEQ ID NO: 3642 - RNA, 31 nt, synthetic construct
  source 1..31: mol_type = other RNA
acaccaacttctttccacagatttctttcta

SEQ ID NO: 3643 - RNA, 31 nt, synthetic construct
  source 1..31: mol_type = other RNA
acaccagcttatctccacagatccctttcta

SEQ ID NO: 3644 - RNA, 31 nt, synthetic construct
  source 1..31: mol_type = other RNA
acacctgcttctttccacagattagattcta

SEQ ID NO: 3645 - RNA, 31 nt, synthetic construct
  source 1..31: mol_type = other RNA
acaccagcttctttccacagattccattcta

SEQ ID NO: 3646 - RNA, 31 nt, synthetic construct
  source 1..31: mol_type = other RNA
ccagcttcttttcacagattagtctctatgt

SEQ ID NO: 3647 - RNA, 32 nt, synthetic construct
  source 1..32: mol_type = other RNA
ccagcttctttccacagattctcggactatgt

SEQ ID NO: 3648 - RNA, 31 nt, synthetic construct
  source 1..31: mol_type = other RNA
ccagcttctttccacatattcattcatatgt

SEQ ID NO: 3649 - RNA, 32 nt, synthetic construct
  source 1..32: mol_type = other RNA
tctttccacagattccattcgaatgttagaca

SEQ ID NO: 3650 - RNA, 31 nt, synthetic construct
  source 1..31: mol_type = other RNA
ccagcgtctttccacagtatactttctatgt

SEQ ID NO: 3651 - RNA, 31 nt, synthetic construct
  source 1..31: mol_type = other RNA
tctttccacagatttctttcgatgttagaca

SEQ ID NO: 3652 - RNA, 31 nt, synthetic construct
  source 1..31: mol_type = other RNA
tctttccacagatccctttcgatgttagaca

SEQ ID NO: 3653 - RNA, 31 nt, synthetic construct
  source 1..31: mol_type = other RNA
ccagcttttttccacggatcgctttctatgt

SEQ ID NO: 3654 - RNA, 41 nt, synthetic construct
  source 1..41: mol_type = other RNA
gcttcttttcacagatcaatttcgatgttagccacacagga

SEQ ID NO: 3655 - RNA, 31 nt, synthetic construct
  source 1..31: mol_type = other RNA
tctttccacagattcttttcgatgtcagaca

SEQ ID NO: 3656 - RNA, 31 nt, synthetic construct
  source 1..31: mol_type = other RNA
tctttccacagatgcctttcgatgttagaca

SEQ ID NO: 3657 - RNA, 38 nt, synthetic construct
  source 1..38: mol_type = other RNA
gagaacacctgcgtcttttcacggattttctatgttag

SEQ ID NO: 3658 - RNA, 31 nt, synthetic construct
  source 1..31: mol_type = other RNA
agaacatcggcttatatccagagaatccttt

SEQ ID NO: 3659 - RNA, 31 nt, synthetic construct
  source 1..31: mol_type = other RNA
tctttccacagattagactcgctgttagaca

SEQ ID NO: 3660 - RNA, 31 nt, synthetic construct
  source 1..31: mol_type = other RNA
tctttccacagattactttcgatgttagaca

SEQ ID NO: 3661 - RNA, 31 nt, synthetic construct
  source 1..31: mol_type = other RNA
ccagcctctttccacagattcctttctatgt

SEQ ID NO: 3662 - RNA, 42 nt, synthetic construct
  source 1..42: mol_type = other RNA
ccagcttctttccacagataacaaaaataccactttatatgt

SEQ ID NO: 3663 - RNA, 31 nt, synthetic construct
  source 1..31: mol_type = other RNA
tctttccacaggttcctttcgatattagaca

SEQ ID NO: 3664 - RNA, 59 nt, synthetic construct
  source 1..59: mol_type = other RNA
aaccaacacggactgcagtgaacccgagagtctaacacagaagcctttactcagattcc

SEQ ID NO: 3665 - RNA, 55 nt, synthetic construct
  source 1..55: mol_type = other RNA
aaccaacacggacagtagggggcgggagtagcactcacttcttagcacagattcc

SEQ ID NO: 3666 - RNA, 35 nt, synthetic construct
  source 1..35: mol_type = other RNA
tcttttcaccgattccttttggacggtgatagaca

SEQ ID NO: 3667 - RNA, 52 nt, synthetic construct
  source 1..52: mol_type = other RNA
gcttctttccaccgattccaccaaaaataccatcgaggttagacacacagga

SEQ ID NO: 3668 - RNA, 31 nt, synthetic construct
  source 1..31: mol_type = other RNA
tcttttcacagatccgtttcgatgttagaca

SEQ ID NO: 3669 - RNA, 31 nt, synthetic construct
  source 1..31: mol_type = other RNA
tctttccacaggttactttagatgttagaca

SEQ ID NO: 3670 - RNA, 31 nt, synthetic construct
  source 1..31: mol_type = other RNA
tctttccacagattacttgagatgtgagaca

SEQ ID NO: 3671 - RNA, 31 nt, synthetic construct
  source 1..31: mol_type = other RNA
tcttttcacagatttctttcgatgttagaca

SEQ ID NO: 3672 - RNA, 41 nt, synthetic construct
  source 1..41: mol_type = other RNA
accagcttcttatcacagatttctttcgatgttagacacac

SEQ ID NO: 3673 - RNA, 31 nt, synthetic construct
  source 1..31: mol_type = other RNA
tcttttcacagatcaatttcgatgttagaca

SEQ ID NO: 3674 - RNA, 31 nt, synthetic construct
  source 1..31: mol_type = other RNA
ccagcttctttccacagattccttactatgt

SEQ ID NO: 3675 - RNA, 31 nt, synthetic construct
  source 1..31: mol_type = other RNA
acaccagcgtcttcccacacattgctttcta

SEQ ID NO: 3676 - RNA, 31 nt, synthetic construct
  source 1..31: mol_type = other RNA
acggagacaaaaccagcgtctttccacagat

SEQ ID NO: 3677 - RNA, 30 nt, synthetic construct
  source 1..30: mol_type = other RNA
tctttccacagattccattcgtgttagaca

SEQ ID NO: 3678 - RNA, 31 nt, synthetic construct
  source 1..31: mol_type = other RNA
ccagcttcactccacagattactttctatgt

SEQ ID NO: 3679 - RNA, 31 nt, synthetic construct
  source 1..31: mol_type = other RNA
acaccatcttctttccacagattcctttcta

SEQ ID NO: 3680 - RNA, 33 nt, synthetic construct
  source 1..33: mol_type = other RNA
ccagcttctttccacagataccttcctctatgt

SEQ ID NO: 3681 - RNA, 40 nt, synthetic construct
  source 1..40: mol_type = other RNA
accagcttcttttcacagccatttatcgattaagacacac

SEQ ID NO: 3682 - RNA, 31 nt, synthetic construct
  source 1..31: mol_type = other RNA
ccagcctctttccacagattactttctatgt

SEQ ID NO: 3683 - RNA, 30 nt, synthetic construct
  source 1..30: mol_type = other RNA
tctttccacagatccatttgatgttagaca

SEQ ID NO: 3684 - RNA, 31 nt, synthetic construct
  source 1..31: mol_type = other RNA
acaccagattctttccacagatccatttcta

SEQ ID NO: 3685 - RNA, 37 nt, synthetic construct
  source 1..37: mol_type = other RNA
acaccagagattgcttgtttccacagatgaatttcta

SEQ ID NO: 3686 - RNA, 43 nt, synthetic construct
  source 1..43: mol_type = other RNA
accagcttcttttcacagattcgtacttcgaagttagacacac

SEQ ID NO: 3687 - RNA, 40 nt, synthetic construct
  source 1..40: mol_type = other RNA
gcttctttcccaggttcttttcgatgttagacacacagga

SEQ ID NO: 3688 - RNA, 31 nt, synthetic construct
  source 1..31: mol_type = other RNA
acaccagcttcttttcacagattcctttcta

SEQ ID NO: 3689 - RNA, 28 nt, synthetic construct
  source 1..28: mol_type = other RNA
ccagcgtcttttcacggattttctatgt

SEQ ID NO: 3690 - RNA, 30 nt, synthetic construct
  source 1..30: mol_type = other RNA
agaacaactgcgtcttttcacggatccttt

SEQ ID NO: 3691 - RNA, 30 nt, synthetic construct
  source 1..30: mol_type = other RNA
agaacaaaagcttcttttcacagatccttt

SEQ ID NO: 3692 - RNA, 31 nt, synthetic construct
  source 1..31: mol_type = other RNA
ccagcgtctttccacagattcctttctatgt

SEQ ID NO: 3693 - RNA, 33 nt, synthetic construct
  source 1..33: mol_type = other RNA
tctttccacagataccttcctcgaagttagaca

SEQ ID NO: 3694 - RNA, 39 nt, synthetic construct
  source 1..39: mol_type = other RNA
ccagctcttccaaagtagaccgagatcgcatttttatgt

SEQ ID NO: 3695 - RNA, 30 nt, synthetic construct
  source 1..30: mol_type = other RNA
agaacactctcttccaaagtagaccccttt

SEQ ID NO: 3696 - RNA, 33 nt, synthetic construct
  source 1..33: mol_type = other RNA
tcttttcacagattcgtacttcgaagttagaca

SEQ ID NO: 3697 - RNA, 34 nt, synthetic construct
  source 1..34: mol_type = other RNA
acaccagcttcttttcacagattcgtactttcta

SEQ ID NO: 3698 - RNA, 32 nt, synthetic construct
  source 1..32: mol_type = other RNA
tctttccacagattccttaaagatgttagaca

SEQ ID NO: 3699 - RNA, 31 nt, synthetic construct
  source 1..31: mol_type = other RNA
ccagcttctttccacagcttcatttctatgt

SEQ ID NO: 3700 - RNA, 31 nt, synthetic construct
  source 1..31: mol_type = other RNA
ccagcttctttccacagatttcttgctatgt

SEQ ID NO: 3701 - RNA, 31 nt, synthetic construct
  source 1..31: mol_type = other RNA
acaccagtgtctttccacaggttcctttcta

SEQ ID NO: 3702 - RNA, 31 nt, synthetic construct
  source 1..31: mol_type = other RNA
ccagcttcttttcacagatccctttctatgt

SEQ ID NO: 3703 - RNA, 31 nt, synthetic construct
  source 1..31: mol_type = other RNA
agaacactcacttcttagcacagattccttt

SEQ ID NO: 3704 - RNA, 41 nt, synthetic construct
  source 1..41: mol_type = other RNA
cacggagagcataccagcttcgttccgcagattcctttcta

SEQ ID NO: 3705 - RNA, 31 nt, synthetic construct
  source 1..31: mol_type = other RNA
ccagcgtctctccacagatttctttctatgt

SEQ ID NO: 3706 - RNA, 31 nt, synthetic construct
  source 1..31: mol_type = other RNA
tctttccacagattcctttcgatgagagaca

SEQ ID NO: 3707 - RNA, 32 nt, synthetic construct
  source 1..32: mol_type = other RNA
agaacacaaagttctgttccacagattccttt

SEQ ID NO: 3708 - RNA, 31 nt, synthetic construct
  source 1..31: mol_type = other RNA
acaccagcctctttccaccgattccattcta

SEQ ID NO: 3709 - RNA, 33 nt, synthetic construct
  source 1..33: mol_type = other RNA
ccagctaggctttccacagattcttttctatgt

SEQ ID NO: 3710 - RNA, 31 nt, synthetic construct
  source 1..31: mol_type = other RNA
acaccagcgtcttgccacaggttcctttcta

SEQ ID NO: 3711 - RNA, 31 nt, synthetic construct
  source 1..31: mol_type = other RNA
tctttccactgcttcctttcgatgttagaca

SEQ ID NO: 3712 - RNA, 41 nt, synthetic construct
  source 1..41: mol_type = other RNA
accagcttcttttcacagatcccacttgctgttagacacac

SEQ ID NO: 3713 - RNA, 31 nt, synthetic construct
  source 1..31: mol_type = other RNA
acaccagcttctttccaccgattcctttcta

SEQ ID NO: 3714 - RNA, 38 nt, synthetic construct
  source 1..38: mol_type = other RNA
accagcttcatttccacagctctcgatgttagacacac

SEQ ID NO: 3715 - RNA, 31 nt, synthetic construct
  source 1..31: mol_type = other RNA
ccagcgtctttccacacattcctttctatgt

SEQ ID NO: 3716 - RNA, 41 nt, synthetic construct
  source 1..41: mol_type = other RNA
gagaacaccaggtctattccaaagatgcttttctatgttag

SEQ ID NO: 3717 - RNA, 31 nt, synthetic construct
  source 1..31: mol_type = other RNA
ccagcgtctttgcgcagtcgaatttctatgt

SEQ ID NO: 3718 - RNA, 31 nt, synthetic construct
  source 1..31: mol_type = other RNA
tctttccacagattccatcagatgttagaca

SEQ ID NO: 3719 - RNA, 31 nt, synthetic construct
  source 1..31: mol_type = other RNA
tctttccacagattactttcgctaatagaca

SEQ ID NO: 3720 - RNA, 50 nt, synthetic construct
  source 1..50: mol_type = other RNA
gcttcttttcacagattagtctcgtcacccccatgttgtgacacacagga

SEQ ID NO: 3721 - RNA, 31 nt, synthetic construct
  source 1..31: mol_type = other RNA
ccagcttctctccacagatttttttctatgt

SEQ ID NO: 3722 - RNA, 31 nt, synthetic construct
  source 1..31: mol_type = other RNA
ccagcatctttccacagattccttcctatgt

SEQ ID NO: 3723 - RNA, 31 nt, synthetic construct
  source 1..31: mol_type = other RNA
acaccataatctttccacagattcctttcta

SEQ ID NO: 3724 - RNA, 41 nt, synthetic construct
  source 1..41: mol_type = other RNA
accagcttatttccacagtttcttaaggatcttagacacac

SEQ ID NO: 3725 - RNA, 31 nt, synthetic construct
  source 1..31: mol_type = other RNA
ccagcatctttccacaggttcctttctatgt

SEQ ID NO: 3726 - RNA, 31 nt, synthetic construct
  source 1..31: mol_type = other RNA
tctttccacagatttctttcgctgttagaca

SEQ ID NO: 3727 - RNA, 31 nt, synthetic construct
  source 1..31: mol_type = other RNA
tctttccccagattccttacgatgttagaca

SEQ ID NO: 3728 - RNA, 31 nt, synthetic construct
  source 1..31: mol_type = other RNA
tctttccacaggttgatttcgatgttagaca

SEQ ID NO: 3729 - RNA, 31 nt, synthetic construct
  source 1..31: mol_type = other RNA
ccagcggctttccacaggttactttatatgt

SEQ ID NO: 3730 - RNA, 31 nt, synthetic construct
  source 1..31: mol_type = other RNA
acaccagcggctttccacaggttactttcta

SEQ ID NO: 3731 - RNA, 31 nt, synthetic construct
  source 1..31: mol_type = other RNA
acaccagcttcttcccactgcttcctttcta

SEQ ID NO: 3732 - RNA, 34 nt, synthetic construct
  source 1..34: mol_type = other RNA
ccagcttctttccacaggggacacctttttatgt

SEQ ID NO: 3733 - RNA, 31 nt, synthetic construct
  source 1..31: mol_type = other RNA
acaccagcttttttccacggatcgctttcta

SEQ ID NO: 3734 - RNA, 31 nt, synthetic construct
  source 1..31: mol_type = other RNA
tctttccacagatcctattcgatgttagaca

SEQ ID NO: 3735 - RNA, 31 nt, synthetic construct
  source 1..31: mol_type = other RNA
acacccacttcttatcacagatttctttcta

SEQ ID NO: 3736 - RNA, 32 nt, synthetic construct
  source 1..32: mol_type = other RNA
acaccagcgtcatttccacacattcctttcta

SEQ ID NO: 3737 - RNA, 42 nt, synthetic construct
  source 1..42: mol_type = other RNA
accagcttctgttccacagataaaacttgataatagacacac

SEQ ID NO: 3738 - RNA, 31 nt, synthetic construct
  source 1..31: mol_type = other RNA
tctttccgcagattccgttcgatggtagaca

SEQ ID NO: 3739 - RNA, 31 nt, synthetic construct; identical to SEQ ID NO: 3738
  source 1..31: mol_type = other RNA

SEQ ID NO: 3740 - RNA, 37 nt, synthetic construct
  source 1..37: mol_type = other RNA
acggagagaacaccagaggttgcttgtttccgcagat

SEQ ID NO: 3741 - RNA, 30 nt, synthetic construct
  source 1..30: mol_type = other RNA
ccagcttctttccacagtttctttttatgt

SEQ ID NO: 3742 - RNA, 33 nt, synthetic construct
  source 1..33: mol_type = other RNA
ccagcctcttcttccacagacgaattgatatgt

SEQ ID NO: 3743 - RNA, 31 nt, synthetic construct
  source 1..31: mol_type = other RNA
ccagcttatttccacagtttcttaagtatgt

SEQ ID NO: 3744 - RNA, 41 nt, synthetic construct
  source 1..41: mol_type = other RNA
gagaacactcacttcttagcacagattcctttctatgttag

SEQ ID NO: 3745 - RNA, 30 nt, synthetic construct
  source 1..30: mol_type = other RNA
ccagcttctttccacagttcctttctatgt

SEQ ID NO: 3746 - RNA, 31 nt, synthetic construct
  source 1..31: mol_type = other RNA
tcttttcacagattcctttcgatgtcagaca

SEQ ID NO: 3747 - RNA, 31 nt, synthetic construct
  source 1..31: mol_type = other RNA
acaccagcgtctttccacgggttcctttcta

SEQ ID NO: 3748 - RNA, 31 nt, synthetic construct
  source 1..31: mol_type = other RNA
ccagcgtctctccacggtttcctttctatgt

SEQ ID NO: 3749 - RNA, 31 nt, synthetic construct
  source 1..31: mol_type = other RNA
ccagcttcttttcacagatcaatttctatgt

SEQ ID NO: 3750 - RNA, 31 nt, synthetic construct
  source 1..31: mol_type = other RNA
tctttccacagatttcttgcgatgtgagaca

SEQ ID NO: 3751 - RNA, 31 nt, synthetic construct
  source 1..31: mol_type = other RNA
tcttttcacagatcccacttgctgttagaca

SEQ ID NO: 3752 - RNA, 31 nt, synthetic construct
  source 1..31: mol_type = other RNA
tctttccaccgattccttttgatattagaca

SEQ ID NO: 3753 - RNA, 41 nt, synthetic construct
  source 1..41: mol_type = other RNA
cacggagagtacatcggcttatatccagagaatcctttcta

SEQ ID NO: 3754 - RNA, 41 nt, synthetic construct
  source 1..41: mol_type = other RNA
gcttctttccgcagattccgttcgatggtaaccacacagga

SEQ ID NO: 3755 - RNA, 41 nt, synthetic construct; identical to SEQ ID NO: 3754
  source 1..41: mol_type = other RNA

SEQ ID NO: 3756 - RNA, 31 nt, synthetic construct
  source 1..31: mol_type = other RNA
acggagacagtaccagcgtctttgcgcagat

SEQ ID NO: 3757 - RNA, 41 nt, synthetic construct
  source 1..41: mol_type = other RNA
gcttctttccgcagatgccttgcggcgttagacacacagga

SEQ ID NO: 3758 - RNA, 32 nt, synthetic construct
  source 1..32: mol_type = other RNA
acaccagattcttttcacagccatttattcta

SEQ ID NO: 3759 - RNA, 31 nt, synthetic construct
  source 1..31: mol_type = other RNA
ccagctcctttccactgattcttttctatgt

SEQ ID NO: 3760 - RNA, 49 nt, synthetic construct
  source 1..49: mol_type = other RNA
accagcttcttttcacagattagtctcgtcacccccatgttagacacac

SEQ ID NO: 3761 - RNA, 31 nt, synthetic construct
  source 1..31: mol_type = other RNA
acggagagggtgccatcttcttttcacagat

SEQ ID NO: 3762 - RNA, 42 nt, synthetic construct
  source 1..42: mol_type = other RNA
tctttccacagataacaaaaataccactttagatgttagaca

SEQ ID NO: 3763 - RNA, 36 nt, synthetic construct
  source 1..36: mol_type = other RNA
acggagagagtctaacacagaagcctttactcagat

SEQ ID NO: 3764 - RNA, 31 nt, synthetic construct
  source 1..31: mol_type = other RNA
tctttccacagcttcatttcgatgttagaca

SEQ ID NO: 3765 - RNA, 31 nt, synthetic construct
  source 1..31: mol_type = other RNA
tctttccacagattaatttcgatgttagaca

SEQ ID NO: 3766 - RNA, 41 nt, synthetic construct
  source 1..41: mol_type = other RNA
aaccaacacggagagcataccagcttcgttccgcagattcc

SEQ ID NO: 3767 - RNA, 31 nt, synthetic construct
  source 1..31: mol_type = other RNA
acacccacctcttatcgcagattcatttcta

SEQ ID NO: 3768 - RNA, 41 nt, synthetic construct
  source 1..41: mol_type = other RNA
accagcttcttatcgcagattcatttcgatgttagacacac

SEQ ID NO: 3769 - RNA, 41 nt, synthetic construct
  source 1..41: mol_type = other RNA
gagaacaccagctacttttcccaggttcttttctatgttag

SEQ ID NO: 3770 - RNA, 31 nt, synthetic construct
  source 1..31: mol_type = other RNA
acaccagcttcttttcacagacttgtttcta

SEQ ID NO: 3771 - RNA, 41 nt, synthetic construct
  source 1..41: mol_type = other RNA
aaccaacagcagagaacaactagcttctttccccagattcc

SEQ ID NO: 3772 - RNA, 31 nt, synthetic construct
  source 1..31: mol_type = other RNA
acaccagcttcttttcactgattcctttcta

SEQ ID NO: 3773 - RNA, 31 nt, synthetic construct
  source 1..31: mol_type = other RNA
tctttccacggtttcctttcgatattagaca

SEQ ID NO: 3774 - RNA, 31 nt, synthetic construct
  source 1..31: mol_type = other RNA
ccagcttctttccacaattttttttctatgt

SEQ ID NO: 3775 - RNA, 32 nt, synthetic construct
  source 1..32: mol_type = other RNA
ccagcttctgttccacagataaaactttatgt

SEQ ID NO: 3776 - RNA, 42 nt, synthetic construct
  source 1..42: mol_type = other RNA
accagcttcttttcacggattttcgctgtcacatagacacac

SEQ ID NO: 3777 - RNA, 29 nt, synthetic construct
  source 1..29: mol_type = other RNA
tctttccacagtttcttttatgttagaca

SEQ ID NO: 3778 - RNA, 31 nt, synthetic construct
  source 1..31: mol_type = other RNA
tctttccacagatccgcatcgatgttagaca

SEQ ID NO: 3779 - RNA, 31 nt, synthetic construct
  source 1..31: mol_type = other RNA
ccagcttcttgccacagatccgcatctatgt

SEQ ID NO: 3780 - RNA, 31 nt, synthetic construct
  source 1..31: mol_type = other RNA
acaccatcttcttttcacagattcctttcta

SEQ ID NO: 3781 - RNA, 32 nt, synthetic construct
  source 1..32: mol_type = other RNA
tctttccacagattctcggacgatgttagaca

SEQ ID NO: 3782 - RNA, 31 nt, synthetic construct
  source 1..31: mol_type = other RNA
tctttccacagacgaattgagatgtgagaca

SEQ ID NO: 3783 - RNA, 31 nt, synthetic construct
  source 1..31: mol_type = other RNA
tctttccacagtttcttaaggatcttagaca

SEQ ID NO: 3784 - RNA, 31 nt, synthetic construct
  source 1..31: mol_type = other RNA
acggagacgaaaccgtgctctttccacagat

SEQ ID NO: 3785 - RNA, 32 nt, synthetic construct
  source 1..32: mol_type = other RNA
acggagagtagcactcacttcttagcacagat

SEQ ID NO: 3786 - RNA, 31 nt, synthetic construct
  source 1..31: mol_type = other RNA
ccagcttcttagcacagattcctttctatgt

SEQ ID NO: 3787 - RNA, 42 nt, synthetic construct
  source 1..42: mol_type = other RNA
cacggagagtagcactcacttcttagcacagattcctttcta

SEQ ID NO: 3788 - RNA, 41 nt, synthetic construct
  source 1..41: mol_type = other RNA
gagaacaccagcttcgttccgcagatttctttctatgttag

SEQ ID NO: 3789 - RNA, 31 nt, synthetic construct
  source 1..31: mol_type = other RNA
agaacaccagcttcgttccgcagattccttt

SEQ ID NO: 3790 - RNA, 31 nt, synthetic construct
  source 1..31: mol_type = other RNA
tcttttcgcagattcatttcgatgttagaca

SEQ ID NO: 3791 - RNA, 32 nt, synthetic construct
  source 1..32: mol_type = other RNA
ccagcttctgttccacagattcctttctatgt

SEQ ID NO: 3792 - RNA, 31 nt, synthetic construct
  source 1..31: mol_type = other RNA
tctttccacagtatactttcgatcttagaca

SEQ ID NO: 3793 - RNA, 31 nt, synthetic construct
  source 1..31: mol_type = other RNA
ccagcttcttttcacagatccgtttctatgt

SEQ ID NO: 3794 - RNA, 30 nt, synthetic construct
  source 1..30: mol_type = other RNA
acaccagcttctttccccagattccttcta

SEQ ID NO: 3795 - RNA, 41 nt, synthetic construct
  source 1..41: mol_type = other RNA
gagaacactagcttctttccccagattccttactatgttag

SEQ ID NO: 3796 - RNA, 34 nt, synthetic construct
  source 1..34: mol_type = other RNA
tctttccacaggggacaccttttgatgttagaca

SEQ ID NO: 3797 - RNA, 31 nt, synthetic construct
  source 1..31: mol_type = other RNA
acaccagcgtctctccacggtttcctttcta

SEQ ID NO: 3798 - RNA, 41 nt, synthetic construct
  source 1..41: mol_type = other RNA
aaccaacaaggatagacaactcacttcttatcacagattcc

SEQ ID NO: 3799 - RNA, 31 nt, synthetic construct
  source 1..31: mol_type = other RNA
ccagcttcttttcacagattcctttttatgt

SEQ ID NO: 3800 - RNA, 31 nt, synthetic construct
  source 1..31: mol_type = other RNA
acaccggcttcttttcacagatcaatttcta

SEQ ID NO: 3801 - RNA, 31 nt, synthetic construct
  source 1..31: mol_type = other RNA
tctttccacacattcctttcgataatagaca

SEQ ID NO: 3802 - RNA, 31 nt, synthetic construct
  source 1..31: mol_type = other RNA
tcttttcacagatccttttcgatgtcagaca

SEQ ID NO: 3803 - RNA, 31 nt, synthetic construct
  source 1..31: mol_type = other RNA
tctttccacagattcctttcgatggtagaca

SEQ ID NO: 3804 - RNA, 31 nt, synthetic construct
  source 1..31: mol_type = other RNA
tctttccacaggctagtttcgatgttagaca

SEQ ID NO: 3805 - RNA, 40 nt, synthetic construct
  source 1..40: mol_type = other RNA
gcttctttcccaggtgcctatcgatgttagacacacagga

SEQ ID NO: 3806 - RNA, 33 nt, synthetic construct
  source 1..33: mol_type = other RNA
acaccagctaagcttttcccaggtgcctttcta

SEQ ID NO: 3807 - RNA, 31 nt, synthetic construct
  source 1..31: mol_type = other RNA
tctttccacgggttcctttcgatgttagaca

SEQ ID NO: 3808 - RNA, 31 nt, synthetic construct
  source 1..31: mol_type = other RNA
tcttttcacagatccctttcgatgttagaca

SEQ ID NO: 3809 - RNA, 31 nt, synthetic construct
  source 1..31: mol_type = other RNA
ccagctacttttcccaggttcttttctatgt

SEQ ID NO: 3810 - RNA, 32 nt, synthetic construct
  source 1..32: mol_type = other RNA
acggagagaacaactagcttctttccccagat

SEQ ID NO: 3811 - RNA, 41 nt, synthetic construct
  source 1..41: mol_type = other RNA
gcttctttccccagattccttacgatgttggacacacagga

SEQ ID NO: 3812 - RNA, 31 nt, synthetic construct
  source 1..31: mol_type = other RNA
ccagcttcttcccactgcttcctttctatgt

SEQ ID NO: 3813 - RNA, 42 nt, synthetic construct
  source 1..42: mol_type = other RNA
gcttctttccacggatcgctttcgatcttaatacacacagga

SEQ ID NO: 3814 - RNA, 42 nt, synthetic construct
  source 1..42: mol_type = other RNA
gcttctttccacaggttgatatcgatcttgagacacacagga

SEQ ID NO: 3815 - RNA, 41 nt, synthetic construct
  source 1..41: mol_type = other RNA
cacggagagacaactcacttcttatcacagattcctttcta

SEQ ID NO: 3816 - RNA, 30 nt, synthetic construct
  source 1..30: mol_type = other RNA
acaccaaagtttttccacgagttctttcta

SEQ ID NO: 3817 - RNA, 31 nt, synthetic construct
  source 1..31: mol_type = other RNA
acacctgcttcttttcacagatcccattcta

SEQ ID NO: 3818 - RNA, 32 nt, synthetic construct
  source 1..32: mol_type = other RNA
tcttttcacggattttcgctgtcacatagaca

SEQ ID NO: 3819 - RNA, 31 nt, synthetic construct
  source 1..31: mol_type = other RNA
ccagcttcttttcacagatccttttctatgt

SEQ ID NO: 3820 - RNA, 31 nt, synthetic construct
  source 1..31: mol_type = other RNA
tctttccacacattgctttcgataatagaca

SEQ ID NO: 3821 - RNA, 31 nt, synthetic construct
  source 1..31: mol_type = other RNA
acaccaggtctattccaaagatgcttttcta

SEQ ID NO: 3822 - RNA, 37 nt, synthetic construct
  source 1..37: mol_type = other RNA
acaccagaggttgcttgtttccgcagatgcctttcta

SEQ ID NO: 3823 - RNA, 33 nt, synthetic construct
  source 1..33: mol_type = other RNA
ccagctaagcttttcccaggtgcctatctatgt

SEQ ID NO: 3824 - RNA, 31 nt, synthetic construct
  source 1..31: mol_type = other RNA
tcttttcacagattccttgggatgttagaca

SEQ ID NO: 3825 - RNA, 42 nt, synthetic construct
  source 1..42: mol_type = other RNA
gcttcttttcacagattccttgggatgttttgaaacacagga

SEQ ID NO: 3826 - RNA, 31 nt, synthetic construct
  source 1..31: mol_type = other RNA
tctttccacagatttttttcgatgtaagaca

SEQ ID NO: 3827 - RNA, 31 nt, synthetic construct
  source 1..31: mol_type = other RNA
tctttccacagatcctttctgatgtcagaca

SEQ ID NO: 3828 - RNA, 31 nt, synthetic construct
  source 1..31: mol_type = other RNA
ccagcttgttcccacatattaatttctatgt

SEQ ID NO: 3829 - RNA, 31 nt, synthetic construct
  source 1..31: mol_type = other RNA
acaccagcttgcttccaccgattcgtttcta

SEQ ID NO: 3830 - RNA, 38 nt, synthetic construct
  source 1..38: mol_type = other RNA
ccagcagcctttactagctgccggtctgccttctatgt

SEQ ID NO: 3831 - RNA, 45 nt, synthetic construct
  source 1..45: mol_type = other RNA
cacggagagagtctaacacagaagcctttactagctgcctttcta

SEQ ID NO: 3832 - RNA, 31 nt, synthetic construct
  source 1..31: mol_type = other RNA
ccagcttcgttccgcagatttctttctatgt

SEQ ID NO: 3833 - RNA, 31 nt, synthetic construct
  source 1..31: mol_type = other RNA
ccagcctcttatcgcagattcatttctatgt

SEQ ID NO: 3834 - RNA, 41 nt, synthetic construct
  source 1..41: mol_type = other RNA
cacggagagatcattcacctcttatcgcagattcctttcta

SEQ ID NO: 3835 - RNA, 32 nt, synthetic construct
  source 1..32: mol_type = other RNA
tcttttcacagacttgtttcgatgcatagaca

SEQ ID NO: 3836 - RNA, 31 nt, synthetic construct
  source 1..31: mol_type = other RNA
ccagcttatttccacagatctgtttctatgt

SEQ ID NO: 3837 - RNA, 31 nt, synthetic construct
  source 1..31: mol_type = other RNA
tctttccacaggttgatatcgatcttagaca

SEQ ID NO: 3838 - RNA, 31 nt, synthetic construct
  source 1..31: mol_type = other RNA
tctttccacagataaaacttgataatagaca

SEQ ID NO: 3839 - RNA, 31 nt, synthetic construct
  source 1..31: mol_type = other RNA
ccagcttatatccagagaatcatttctatgt

SEQ ID NO: 3840 - RNA, 43 nt, synthetic construct
  source 1..43: mol_type = other RNA
acggagggcgtgtaacccaaggggggcagaaatttccgcagat

SEQ ID NO: 3841 - RNA, 54 nt, synthetic construct
  source 1..54: mol_type = other RNA
aaccaacacgtgagggcgtgtaacccaaggggggcagaaatttccgcagattcc

SEQ ID NO: 3842 - RNA, 33 nt, synthetic construct
  source 1..33: mol_type = other RNA
ccagcagaaatttccgcagattccgttctatgt

SEQ ID NO: 3843 - RNA, 43 nt, synthetic construct; identical to SEQ ID NO: 3840
  source 1..43: mol_type = other RNA

SEQ ID NO: 3844 - RNA, 54 nt, synthetic construct; identical to SEQ ID NO: 3841
  source 1..54: mol_type = other RNA

SEQ ID NO: 3845 - RNA, 33 nt, synthetic construct; identical to SEQ ID NO: 3842
  source 1..33: mol_type = other RNA

SEQ ID NO: 3846 - RNA, 31 nt, synthetic construct
  source 1..31: mol_type = other RNA
tctttgcgcagtcgaatttcgatcttagaca

SEQ ID NO: 3847 - RNA, 31 nt, synthetic construct
  source 1..31: mol_type = other RNA
acaccagattcttttcacagattagtttcta

SEQ ID NO: 3848 - RNA, 40 nt, synthetic construct
  source 1..40: mol_type = other RNA
cacggagagaacactctcttccaaagtagacccctttcta

SEQ ID NO: 3849 - RNA, 32 nt, synthetic construct
  source 1..32: mol_type = other RNA
tctttcccacatattaatttcgatgtcagaca

SEQ ID NO: 3850 - RNA, 31 nt, synthetic construct
  source 1..31: mol_type = other RNA
acaccaggttctttccacatattcatttcta

SEQ ID NO: 3851 - RNA, 37 nt, synthetic construct
  source 1..37: mol_type = other RNA
tctttactagctgccggtctgccttcgatgttagaca

SEQ ID NO: 3852 - RNA, 30 nt, synthetic construct
  source 1..30: mol_type = other RNA
agaacacagaagcctttactagctgccttt

SEQ ID NO: 3853 - RNA, 31 nt, synthetic construct
  source 1..31: mol_type = other RNA
acaccagcttcgttccgcagatttctttcta

SEQ ID NO: 3854 - RNA, 31 nt, synthetic construct
  source 1..31: mol_type = other RNA
tctttccacacaccccttttgatgatagaca

SEQ ID NO: 3855 - RNA, 31 nt, synthetic construct
  source 1..31: mol_type = other RNA
ccagcttcttatcacagatttctttctatgt

SEQ ID NO: 3856 - RNA, 31 nt, synthetic construct
  source 1..31: mol_type = other RNA
tcttttcacagattccttttgatcttagaca

SEQ ID NO: 3857 - RNA, 31 nt, synthetic construct
  source 1..31: mol_type = other RNA
tctttccagagaatcatttcgatgttagaca

SEQ ID NO: 3858 - RNA, 53 nt, synthetic construct
  source 1..53: mol_type = other RNA
cacggagagcgtgtaacccaaggggggcagaaatttccgcagattcctttcta

SEQ ID NO: 3859 - RNA, 33 nt, synthetic construct
  source 1..33: mol_type = other RNA
acaccggcagaaatttccgcagattccgttcta

SEQ ID NO: 3860 - RNA, 53 nt, synthetic construct; identical to SEQ ID NO: 3858
  source 1..53: mol_type = other RNA

SEQ ID NO: 3861 - RNA, 33 nt, synthetic construct; identical to SEQ ID NO: 3859
  source 1..33: mol_type = other RNA

SEQ ID NO: 3862 - RNA, 41 nt, synthetic construct
  source 1..41: mol_type = other RNA
accagcttctttgcgcagtcgaatttcgatcttagacacac

SEQ ID NO: 3863 - RNA, 31 nt, synthetic construct
  source 1..31: mol_type = other RNA
ccagcttgtttccgcagatgccttgctatgt

SEQ ID NO: 3864 - RNA, 30 nt, synthetic construct
  source 1..30: mol_type = other RNA
tcttttcacagccatttatcgattaagaca

SEQ ID NO: 3865 - RNA, 30 nt, synthetic construct
  source 1..30: mol_type = other RNA
tctttcccaggtgcctatcgatgttagaca

SEQ ID NO: 3866 - RNA, 31 nt, synthetic construct
  source 1..31: mol_type = other RNA
acggaaagaacacaataatctttccacagat

SEQ ID NO: 3867 - RNA, 33 nt, synthetic construct
  source 1..33: mol_type = other RNA
tctttccaccgattcgtacatcgcggttagaca

SEQ ID NO: 3868 - RNA, 31 nt, synthetic construct
  source 1..31: mol_type = other RNA
acggagagcataccagcttcgttccgcagat

SEQ ID NO: 3869 - RNA, 31 nt, synthetic construct
  source 1..31: mol_type = other RNA
acggatagatcattcacctcttatcgcagat

SEQ ID NO: 3870 - RNA, 41 nt, synthetic construct
  source 1..41: mol_type = other RNA
gagaacactcacctcttatcgcagattcatttctatgttag

SEQ ID NO: 3871 - RNA, 42 nt, synthetic construct
  source 1..42: mol_type = other RNA
tctttccaccgattccaccaaaaataccatcgaggttagaca

SEQ ID NO: 3872 - RNA, 41 nt, synthetic construct
  source 1..41: mol_type = other RNA
accagcttcttttcccaggttcttttcgatgttagacacac

SEQ ID NO: 3873 - RNA, 31 nt, synthetic construct
  source 1..31: mol_type = other RNA
acaccagcgtctttccatagattcctttcta

SEQ ID NO: 3874 - RNA, 28 nt, synthetic construct
  source 1..28: mol_type = other RNA
acacctgcgtcttttcacggattttcta

SEQ ID NO: 3875 - RNA, 31 nt, synthetic construct
  source 1..31: mol_type = other RNA
agaacaccaggtctattccaaagatgccttt

SEQ ID NO: 3876 - RNA, 37 nt, synthetic construct
  source 1..37: mol_type = other RNA
agaacaccagaggttgcttgtttccgcagatgccttt

SEQ ID NO: 3877 - RNA, 31 nt, synthetic construct
  source 1..31: mol_type = other RNA
acaccagaagcctttactagctgccgttcta

SEQ ID NO: 3878 - RNA, 30 nt, synthetic construct
  source 1..30: mol_type = other RNA
tctttcccaggttcttttcgatgttagaca

SEQ ID NO: 3879 - RNA, 41 nt, synthetic construct
  source 1..41: mol_type = other RNA
tctttccaaagtagaccgagatcgcattttggcgttagaca

SEQ ID NO: 3880 - RNA, 31 nt, synthetic construct
  source 1..31: mol_type = other RNA
acggagacaacaacagcctctttccacagat

SEQ ID NO: 3881 - RNA, 41 nt, synthetic construct
  source 1..41: mol_type = other RNA
caccaccctgttgctgtagccaaagtcgttgtcacaccagg

SEQ ID NO: 3882 - RNA, 41 nt, synthetic construct
  source 1..41: mol_type = other RNA
caccaccctgttgctgtagccaaattcggtgtcacaccagg

SEQ ID NO: 3883 - RNA, 41 nt, synthetic construct
  source 1..41: mol_type = other RNA
tgtagccaaattcgctgtcacaccaggaaatgagcttgaca

SEQ ID NO: 3884 - RNA, 41 nt, synthetic construct
  source 1..41: mol_type = other RNA
tgtagccaaattcgttgtcacacccagaactgagcttgaca

SEQ ID NO: 3885 - RNA, 42 nt, synthetic construct
  source 1..42: mol_type = other RNA
tgtagccaaattcgattgtcacacccggaaatgagcttgaca

SEQ ID NO: 3886 - RNA, 41 nt, synthetic construct
  source 1..41: mol_type = other RNA
tgtagccaaattcgttgtcacactaagagatgagcttgaca

SEQ ID NO: 3887 - RNA, 41 nt, synthetic construct
  source 1..41: mol_type = other RNA
tgtagccaaattcgctgctacaccaggaaatgagcttgaca

SEQ ID NO: 3888 - RNA, 41 nt, synthetic construct
  source 1..41: mol_type = other RNA
tgtagccaaattcggtgtcacaccaggaagtgagcttgaca

SEQ ID NO: 3889 - RNA, 41 nt, synthetic construct
  source 1..41: mol_type = other RNA
caccaccctgttgctgtagccatattcgttctcacaccagg

SEQ ID NO: 3890 - RNA, 41 nt, synthetic construct
  source 1..41: mol_type = other RNA
caccaccctgttgctgtagcacaatccgttgtcacaccagg

SEQ ID NO: 3891 - RNA, 42 nt, synthetic construct
  source 1..42: mol_type = other RNA
caccaccctgttgctgtagccaaattcggttgtcacaccagg

SEQ ID NO: 3892 - RNA, 41 nt, synthetic construct
  source 1..41: mol_type = other RNA
tgtagccaaattcgttgacacacccgggaatgagcttgaca

SEQ ID NO: 3893 - RNA, 41 nt, synthetic construct
  source 1..41: mol_type = other RNA
tgtagccaaattcgttgtcacaccgcgaaatgagcttgaca

SEQ ID NO: 3894 - RNA, 41 nt, synthetic construct
  source 1..41: mol_type = other RNA
tgtagccaaattcgtagtcacaccaaaaaatgagcttgaca

SEQ ID NO: 3895 - RNA, 42 nt, synthetic construct
  source 1..42: mol_type = other RNA
caccaccctgttgctgtagccaaattccattgtcacaccagg

SEQ ID NO: 3896 - RNA, 41 nt, synthetic construct
  source 1..41: mol_type = other RNA
tgtagccaaattcattgtcacaccccgaaatgagcttgaca

SEQ ID NO: 3897 - RNA, 41 nt, synthetic construct
  source 1..41: mol_type = other RNA
caccaccctgttgctgtagccatattcgctgttacaccagg

SEQ ID NO: 3898 - RNA, 41 nt, synthetic construct
  source 1..41: mol_type = other RNA
caccaccctgttgctgtagccatagtcgttgtcacaccagg

SEQ ID NO: 3899 - RNA, 41 nt, synthetic construct
  source 1..41: mol_type = other RNA
tgtagccaaattcgctgtcacaccgggaaatgagcttgaca

SEQ ID NO: 3900 - RNA, 41 nt, synthetic construct
  source 1..41: mol_type = other RNA
tgtagccaaattcattgtcacaccaagaaatgagcttgaca

SEQ ID NO: 3901 - RNA, 42 nt, synthetic construct
  source 1..42: mol_type = other RNA
tgtagccaaattcggttgtcacaccggacaatgagcttgaca

SEQ ID NO: 3902 - RNA, 41 nt, synthetic construct
  source 1..41: mol_type = other RNA
tgtagccaaattcgttgtcacaccaggagatgagcttgaca

SEQ ID NO: 3903 - RNA, 42 nt, synthetic construct
  source 1..42: mol_type = other RNA
caccaccctgttgctgtagccgaattcgtatgtcacaccagg

SEQ ID NO: 3904 - RNA, 41 nt, synthetic construct
  source 1..41: mol_type = other RNA
caccaccctgttgctgtagccacattcgtcgtcacaccagg

SEQ ID NO: 3905 - RNA, 40 nt, synthetic construct
  source 1..40: mol_type = other RNA
caccaccctgttgctgtagccatattcgttgtcacaccgg

SEQ ID NO: 3906 - RNA, 42 nt, synthetic construct
  source 1..42: mol_type = other RNA
tgtagccaaattcgtatgtcacaccaggcagtgagcttgaca

SEQ ID NO: 3907 - RNA, 41 nt, synthetic construct
  source 1..41: mol_type = other RNA
caccaccctgttgctgtagccaaaatcgttgtcacaccagg

SEQ ID NO: 3908 - RNA, 41 nt, synthetic construct
  source 1..41: mol_type = other RNA
caccaccctgttgctgtagccaaattggttgtcacaccagg

SEQ ID NO: 3909 - RNA, 41 nt, synthetic construct
  source 1..41: mol_type = other RNA
caccaccctgttgctgtagccaaagtagttgtcacaccagg

SEQ ID NO: 3910 - RNA, 41 nt, synthetic construct
  source 1..41: mol_type = other RNA
tgtagccaaattcgttgtcacaccagggagtgagcttgaca

SEQ ID NO: 3911 - RNA, 41 nt, synthetic construct
  source 1..41: mol_type = other RNA
caccaccctgttgctgtagccgaattcgttgtcacaccagg

SEQ ID NO: 3912 - RNA, 41 nt, synthetic construct
  source 1..41: mol_type = other RNA
tgtagccaaattggtttacacacccggaaatgagcttgaca

SEQ ID NO: 3913 - RNA, 41 nt, synthetic construct
  source 1..41: mol_type = other RNA
tgtagccaaattcgttgtcacaccaggtaatgagcttgaca

SEQ ID NO: 3914 - RNA, 41 nt, synthetic construct
  source 1..41: mol_type = other RNA
tgtagccaaattcgttgtcacacccggaaatgagcttgaca

SEQ ID NO: 3915 - RNA, 41 nt, synthetic construct
  source 1..41: mol_type = other RNA
tgtagccaaattcgttgtcacacccagaaatgagcttgaca

SEQ ID NO: 3916 - RNA, 41 nt, synthetic construct
  source 1..41: mol_type = other RNA
tgtagccaaattggttgtcacaccacgaaatgagcttgaca

SEQ ID NO: 3917 - RNA, 41 nt, synthetic construct
  source 1..41: mol_type = other RNA
caccaccctgttgctgtagccacattcgttaccacaccaga

SEQ ID NO: 3918 - RNA, 41 nt, synthetic construct
  source 1..41: mol_type = other RNA
tgtagccaaattcgttgtcacaccgggaaatgagcttgaca

SEQ ID NO: 3919 - RNA, 41 nt, synthetic construct
  source 1..41: mol_type = other RNA
caccaccctgttgctgtagccacgttcgttgtcacaccagg

SEQ ID NO: 3920 - RNA, 41 nt, synthetic construct
  source 1..41: mol_type = other RNA
caccaccctgttgctgtagcccaatttgttatcacaccaag

SEQ ID NO: 3921 - RNA, 41 nt, synthetic construct
  source 1..41: mol_type = other RNA
caccaccctgttgctgtagcccaatttgttgtcacaccacg

SEQ ID NO: 3922 - RNA, 41 nt, synthetic construct
  source 1..41: mol_type = other RNA
tgtagccaaattcgttaccacaccagatcatgagcttgaca

SEQ ID NO: 3923 - RNA, 41 nt, synthetic construct
  source 1..41: mol_type = other RNA
tgtagccaaattagttgtcacaccaggagatgagcttgaca

SEQ ID NO: 3924 - RNA, 41 nt, synthetic construct
  source 1..41: mol_type = other RNA
tgtagccaaattcgttctcacaccaggaaatgagcttgaca

SEQ ID NO: 3925 - RNA, 41 nt, synthetic construct
  source 1..41: mol_type = other RNA
tgtagccaaattcgttgtcacaccaagaagtgagcttgaca

SEQ ID NO: 3926 - RNA, 41 nt, synthetic construct
  source 1..41: mol_type = other RNA
caccaccctgttgctgtagccaaattggtggtcacaccagg

SEQ ID NO: 3927 - RNA, 41 nt, synthetic construct
  source 1..41: mol_type = other RNA
tgtagccaaattcgttgtcacaccgggcagtgagcttgaca

SEQ ID NO: 3928 - RNA, 41 nt, synthetic construct
  source 1..41: mol_type = other RNA
caccaccctgttgctgtagccaaattggttgtcacaccacg

SEQ ID NO: 3929 - RNA, 41 nt, synthetic construct
  source 1..41: mol_type = other RNA
tgtagccaaagtcgttgtaacaccaggaaatgagcttgaca

SEQ ID NO: 3930 - RNA, 41 nt, synthetic construct
  source 1..41: mol_type = other RNA
tgtagccaaattcgttgtcacaccggtaaatgagcttgaca

SEQ ID NO: 3931 - RNA, 41 nt, synthetic construct
  source 1..41: mol_type = other RNA
tgtagccaaatccgttgtcacacctggaaatgagcttgaca

SEQ ID NO: 3932 - RNA, 40 nt, synthetic construct
  source 1..40: mol_type = other RNA
caccaccctgttgctgtagccaaatttgttgtcacaccac

SEQ ID NO: 3933 - RNA, 41 nt, synthetic construct
  source 1..41: mol_type = other RNA
tgtagccaaattcgttgtcacactacgaaatgagcttgaca

SEQ ID NO: 3934 - RNA, 41 nt, synthetic construct
  source 1..41: mol_type = other RNA
tgtagccaaattagttgtcacacccggaaatgagcttgaca

SEQ ID NO: 3935 - RNA, 41 nt, synthetic construct
  source 1..41: mol_type = other RNA
tgtagccaaattcgttgtcacaccaggtcctgagcttgaca

SEQ ID NO: 3936 - RNA, 41 nt, synthetic construct
  source 1..41: mol_type = other RNA
tgtagccaaattcgttgccacactaggttatgagcttgaca

SEQ ID NO: 3937 - RNA, 41 nt, synthetic construct
  source 1..41: mol_type = other RNA
tgtagccaaattggtggtcacaccaggaaatgagcttgaca

SEQ ID NO: 3938 - RNA, 41 nt, synthetic construct
  source 1..41: mol_type = other RNA
caccaccctgttgctgtagccaaattcgctgacacaccagg

SEQ ID NO: 3939 - RNA, 41 nt, synthetic construct
  source 1..41: mol_type = other RNA
caccaccctgttgctgtagccaacttcgttgtcacaccagg

SEQ ID NO: 3940 - RNA, 41 nt, synthetic construct
  source 1..41: mol_type = other RNA
caccaccctgttgctgtagccaaattcggtgtcgcaccagg

SEQ ID NO: 3941 - RNA, 41 nt, synthetic construct
  source 1..41: mol_type = other RNA
tgtagccaaatccgttgtcacaccaggaaatgagcttgaca

SEQ ID NO: 3942 - RNA, 41 nt, synthetic construct
  source 1..41: mol_type = other RNA
tgtagccaaattagttgtcacaccgaaaaatgagcttgaca

SEQ ID NO: 3943 - RNA, 41 nt, synthetic construct
  source 1..41: mol_type = other RNA
tgtagccaaattcgctgttacaccaggatatgagcttgaca

SEQ ID NO: 3944 - RNA, 41 nt, synthetic construct
  source 1..41: mol_type = other RNA
tgtagccaaattcgctgacacaccaggaaatgagcttgaca

SEQ ID NO: 3945 - RNA, 41 nt, synthetic construct
  source 1..41: mol_type = other RNA
tgtagccaaattcgttgtcacaccagcaaatgagcttgaca

SEQ ID NO: 3946 - RNA, 41 nt, synthetic construct
  source 1..41: mol_type = other RNA
caccaccctgttgctgtagccaaatcggttctcacaccagg

SEQ ID NO: 3947 - RNA, 41 nt, synthetic construct
  source 1..41: mol_type = other RNA
tgtagccaaatccgttgtcacaccaagaaatgagcttgaca

SEQ ID NO: 3948 - RNA, 41 nt, synthetic construct
  source 1..41: mol_type = other RNA
tgtagccaaagtagttgtcacaccaggaaatgagcttgaca

SEQ ID NO: 3949 - RNA, 41 nt, synthetic construct
  source 1..41: mol_type = other RNA
tgtagccaaattcgttgtcacaccaggaagtgagcttgaca

SEQ ID NO: 3950 - RNA, 41 nt, synthetic construct
  source 1..41: mol_type = other RNA
caccaccctgttgctgtagccaagttcgttgtcacaccagg

SEQ ID NO: 3951 - RNA, 42 nt, synthetic construct
  source 1..42: mol_type = other RNA
tgtagccaaattccattgtcacaccaggaagtgagcttgaca

SEQ ID NO: 3952 - RNA, 41 nt, synthetic construct
  source 1..41: mol_type = other RNA
tgtagccaaattcgttgccacaccaggagatgagcttgaca

SEQ ID NO: 3953 - RNA, 41 nt, synthetic construct
  source 1..41: mol_type = other RNA
caccaccctgttgctgtagccaaactcgtagtcacaccagg

SEQ ID NO: 3954 - RNA, 41 nt, synthetic construct
  source 1..41: mol_type = other RNA
caccaccctgttgctgtagccaaattcgttatcacaccagg

SEQ ID NO: 3955 - RNA, 41 nt, synthetic construct
  source 1..41: mol_type = other RNA
tgtagccaaattcgttgttacaccaggaaatgagcttgaca

SEQ ID NO: 3956 - RNA, 41 nt, synthetic construct
  source 1..41: mol_type = other RNA
caccaccctgttgctgtagccaaattcgctgctacaccagg

SEQ ID NO: 3957 - RNA, 41 nt, synthetic construct
  source 1..41: mol_type = other RNA
caccaccctgttgctgtagccaaagtcgttgtcacaacagg

SEQ ID NO: 3958 - RNA, 41 nt, synthetic construct
  source 1..41: mol_type = other RNA
caccaccctgttgctgtagccaaattcgctgtcacaccagg

SEQ ID NO: 3959 - RNA, 45 nt, synthetic construct
  source 1..45: mol_type = other RNA
tgtagccaaattcgttagtcacaccagaacgaaatgagcttgaca

SEQ ID NO: 3960 - RNA, 41 nt, synthetic construct
  source 1..41: mol_type = other RNA
caccaccctgttgctgtagccaaattcgttgtcacactaga

SEQ ID NO: 3961 - RNA, 41 nt, synthetic construct
  source 1..41: mol_type = other RNA
tgtagccaaatttgttatcacaccaagaaacgagcttgaca

SEQ ID NO: 3962 - RNA, 42 nt, synthetic construct
  source 1..42: mol_type = other RNA
tgtagccaaatgcgttatcacaccgcgaaagtgagcttgaca

SEQ ID NO: 3963 - RNA, 41 nt, synthetic construct
  source 1..41: mol_type = other RNA
caccaccctgttgctgtagccacattcgttggcacaccagg

SEQ ID NO: 3964 - RNA, 41 nt, synthetic construct
  source 1..41: mol_type = other RNA
tgtagccaaattcgttgtcacaacgggaaatgagcttgaca

SEQ ID NO: 3965 - RNA, 41 nt, synthetic construct
  source 1..41: mol_type = other RNA
caccaccctgttgctgtagccacattcgttgtcacaccacg

SEQ ID NO: 3966 - RNA, 41 nt, synthetic construct
  source 1..41: mol_type = other RNA
tgtagccaaattccttgtcataccaggaaatgagcttgaca

SEQ ID NO: 3967 - RNA, 41 nt, synthetic construct
  source 1..41: mol_type = other RNA
caccaccctgttgctgtagccaaattccttgtcacaccagg

SEQ ID NO: 3968 - RNA, 41 nt, synthetic construct
  source 1..41: mol_type = other RNA
tgtagccaaattcgttgtcacactaagaaatgagcttgaca

SEQ ID NO: 3969 - RNA, 42 nt, synthetic construct
  source 1..42: mol_type = other RNA
tgtagccaaattcggttgtcacaccaggaaatgagcttgaca

SEQ ID NO: 3970 - RNA, 41 nt, synthetic construct
  source 1..41: mol_type = other RNA
tgtagccaaattggttgtcacaccagggaatgagcttgaca

SEQ ID NO: 3971 - RNA, 44 nt, synthetic construct
  source 1..44: mol_type = other RNA
tgtagccaaattcgttgttacaccaggctgagatgagcttgaca

SEQ ID NO: 3972 - RNA, 41 nt, synthetic construct
  source 1..41: mol_type = other RNA
tgtagccaaattcgttgtcacaccacgaaatgagcttgaca

SEQ ID NO: 3973 - RNA, 41 nt, synthetic construct
  source 1..41: mol_type = other RNA
tgtagccaaattcgttatcacaccgggaaacgagcttgaca

SEQ ID NO: 3974 - RNA, 41 nt, synthetic construct
  source 1..41: mol_type = other RNA
tgtagccaaattcgtggtcacaccacgaaatgagcttgaca

SEQ ID NO: 3975 - RNA, 41 nt, synthetic construct
  source 1..41: mol_type = other RNA
caccaccctgttgctgtagccaaattcgttgtcacaacagg

SEQ ID NO: 3976 - RNA, 41 nt, synthetic construct
  source 1..41: mol_type = other RNA
caccaccctgttgctgtagccacattcgttgtcacaccggg

SEQ ID NO: 3977 - RNA, 41 nt, synthetic construct
  source 1..41: mol_type = other RNA
caccaccctgttgctgtagccaaattcgttgaattatcagg

SEQ ID NO: 3978 - RNA, 40 nt, synthetic construct
  source 1..40: mol_type = other RNA
caccaccctgttgctgtagccaacttcgttgtcacaccgg

SEQ ID NO: 3979 - RNA, 41 nt, synthetic construct
  source 1..41: mol_type = other RNA
tgtagccaaattcgttatgacaccaggaaatgagcttgaca

SEQ ID NO: 3980 - RNA, 41 nt, synthetic construct
  source 1..41: mol_type = other RNA
tgtagccaaattcgttgtcacaccaggaattgagcttgaca

SEQ ID NO: 3981 - RNA, 42 nt, synthetic construct
  source 1..42: mol_type = other RNA
caccaccctgttgctgtagccaaattcggttgtcacaccaga

SEQ ID NO: 3982 - RNA, 41 nt, synthetic construct
  source 1..41: mol_type = other RNA
tgtagccaaattcgttgtcacaccaagaactgagcttgaca

SEQ ID NO: 3983 - RNA, 41 nt, synthetic construct
  source 1..41: mol_type = other RNA
tgtagccaaattcgttgtcacactagtaaatgagcttgaca

SEQ ID NO: 3984 - RNA, 45 nt, synthetic construct
  source 1..45: mol_type = other RNA
tgtagccaaattcgttgtgacaccaggaaatatatgagcttgaca

SEQ ID NO: 3985 - RNA, 40 nt, synthetic construct
  source 1..40: mol_type = other RNA
caccaccctgttgctgtagccaattcgttctcacaccagg

SEQ ID NO: 3986 - RNA, 41 nt, synthetic construct
  source 1..41: mol_type = other RNA
caccaccctgttgctgtagcaaaagtcgttgtcacaccgga

SEQ ID NO: 3987 - RNA, 41 nt, synthetic construct
  source 1..41: mol_type = other RNA
tgtagccaaattcgttatcacaccaggaaatgagcttgaca

SEQ ID NO: 3988 - RNA, 41 nt, synthetic construct
  source 1..41: mol_type = other RNA
tgtagccaaattagttgtcacaccacgaaacgagcttgaca

SEQ ID NO: 3989 - RNA, 41 nt, synthetic construct
  source 1..41: mol_type = other RNA
caccaccctgttgctgtagccaaatgtgttgtcacaccggg

SEQ ID NO: 3990 - RNA, 41 nt, synthetic construct
  source 1..41: mol_type = other RNA
tgtagccaaattcgttgtcacaacaggaaatgagcttgaca

SEQ ID NO: 3991 - RNA, 41 nt, synthetic construct
  source 1..41: mol_type = other RNA
tgtagccaaattcgttgtcacacgaggaaatgagcttgaca

SEQ ID NO: 3992 - RNA, 41 nt, synthetic construct
  source 1..41: mol_type = other RNA
caccaccctgttgctgtagccaaattagttgtcacacccgg

SEQ ID NO: 3993 - RNA, 41 nt, synthetic construct
  source 1..41: mol_type = other RNA
tgtagccaaattcgttgtcacacagggaaatgagcttgaca

SEQ ID NO: 3994 - RNA, 41 nt, synthetic construct
  source 1..41: mol_type = other RNA
tgtagccaaattcgttgtcacactaggaaatgagcttgaca

SEQ ID NO: 3995 - RNA, 41 nt, synthetic construct
  source 1..41: mol_type = other RNA
tgtagccaaattcgttgacacaccaggaaatgagcttgaca

SEQ ID NO: 3996 - RNA, 41 nt, synthetic construct
  source 1..41: mol_type = other RNA
caccaccctgttgctgtagccaaattaattgtcacaccagg

SEQ ID NO: 3997 - RNA, 41 nt, synthetic construct
  source 1..41: mol_type = other RNA
caccaccctgttgctgtagccaaattagttgtcacaccagg

SEQ ID NO: 3998 - RNA, 41 nt, synthetic construct
  source 1..41: mol_type = other RNA
caccaccctgttgctgtagccaaattcgttatcacaccggg

SEQ ID NO: 3999 - RNA, 41 nt, synthetic construct
  source 1..41: mol_type = other RNA
tgtagccaaattcgttgtaacacccagaaatgagcttgaca

SEQ ID NO: 4000 - RNA, 41 nt, synthetic construct
  source 1..41: mol_type = other RNA
tgtagccaaattcgtcgtcacaccgggaaacgagcttgaca

SEQ ID NO: 4001 - RNA, 41 nt, synthetic construct
  source 1..41: mol_type = other RNA
tgtagccaaattagttgtcacacacggaaatgagcttgaca

SEQ ID NO: 4002 - RNA, 40 nt, synthetic construct
  source 1..40: mol_type = other RNA
tgtagccaaatgcgttgtcacaccggaaatgagcttgaca

SEQ ID NO: 4003 - RNA, 42 nt, synthetic construct
  source 1..42: mol_type = other RNA
tgtagccaaattcgttctcacaccaaaacattgagcttgaca

SEQ ID NO: 4004 - RNA, 40 nt, synthetic construct
  source 1..40: mol_type = other RNA
tgtagccaaatgtgttgtcacaccgggaatgagcttgaca

SEQ ID NO: 4005 - RNA, 41 nt, synthetic construct
  source 1..41: mol_type = other RNA
caccaccctgttgctgtagccaaattcgttctcacaccagg

SEQ ID NO: 4006 - RNA, 41 nt, synthetic construct
  source 1..41: mol_type = other RNA
tgtagccaaagtcgttgtcacaccagggagtgagcttgaca

SEQ ID NO: 4007 - RNA, 41 nt, synthetic construct
  source 1..41: mol_type = other RNA
tgtagccaaattcgttgtaacaccaagaaatgagcttgaca

SEQ ID NO: 4008 - RNA, 40 nt, synthetic construct
  source 1..40: mol_type = other RNA
caccaccctgttgctgtagccaaattcgttgccacaccaa

SEQ ID NO: 4009 - RNA, 41 nt, synthetic construct
  source 1..41: mol_type = other RNA
caccaccctgttgctgtagccaaatgcgttatcacaccgcg

SEQ ID NO: 4010 - RNA, 40 nt, synthetic construct
  source 1..40: mol_type = other RNA
tgtagccaaattcgttgtcacaccgggaatgagcttgaca

SEQ ID NO: 4011 - RNA, 41 nt, synthetic construct
  source 1..41: mol_type = other RNA
tgtagccaaattcgttgtaacaccaggaaatgagcttgaca

SEQ ID NO: 4012 - RNA, 41 nt, synthetic construct
  source 1..41: mol_type = other RNA
tgtagccaaagtcgttgtcacaccagggggtgagcttgaca

SEQ ID NO: 4013 - RNA, 41 nt, synthetic construct
  source 1..41: mol_type = other RNA
tgtagccaaactcgttgtcacacccggcaatgagcttgaca

SEQ ID NO: 4014 - RNA, 41 nt, synthetic construct
  source 1..41: mol_type = other RNA
caccaccctgttgctgtagccaaattcgttgttacaccagg

SEQ ID NO: 4015 - RNA, 41 nt, synthetic construct
  source 1..41: mol_type = other RNA
caccaccctgttgctgtagccaaattcgtggtcacaccacg

SEQ ID NO: 4016 - RNA, 41 nt, synthetic construct
  source 1..41: mol_type = other RNA
tgtagccaaaatcgttgtcacaccaggaaatgagcttgaca

SEQ ID NO: 4017 - RNA, 41 nt, synthetic construct
  source 1..41: mol_type = other RNA
tgtagccaaattcgctgttacacaaggaaatgagcttgaca

SEQ ID NO: 4018 - RNA, 41 nt, synthetic construct
  source 1..41: mol_type = other RNA
caccaccctgttgctgtagccacattcgttgtcacaacagg

SEQ ID NO: 4019 - RNA, 41 nt, synthetic construct
  source 1..41: mol_type = other RNA
caccaccctgttgctgtagccaaatccgttgtcacaccagg

SEQ ID NO: 4020 - RNA, 41 nt, synthetic construct
  source 1..41: mol_type = other RNA
caccaccctgttgctgtagccacattcgttgtcacaccagg

SEQ ID NO: 4021 - RNA, 41 nt, synthetic construct
  source 1..41: mol_type = other RNA
caccaccctgttgctgtagccaaattcgttctcacaccatg

SEQ ID NO: 4022 - RNA, 41 nt, synthetic construct
  source 1..41: mol_type = other RNA
caccaccctgttgctgtagccaaattcgttgtaacaccaag

SEQ ID NO: 4023 - RNA, 41 nt, synthetic construct
  source 1..41: mol_type = other RNA
caccaccctgttgctgtagccaaattcgttgtcacaccagg

SEQ ID NO: 4024 - RNA, 41 nt, synthetic construct
  source 1..41: mol_type = other RNA
caccaccctgttgctgtagcgaaattcgttgtcacacccag

SEQ ID NO: 4025 - RNA, 41 nt, synthetic construct
  source 1..41: mol_type = other RNA
tgtagccaaattcgttgtcacaccaggaaatgagcttgaca

SEQ ID NO: 4026 - RNA, 41 nt, synthetic construct
  source 1..41: mol_type = other RNA
tgtagccaaattcgtcctcacacccggaaatgagcttgaca

SEQ ID NO: 4027 - RNA, 41 nt, synthetic construct
  source 1..41: mol_type = other RNA
tgtagccaaactcgtttacacaccaggaaatgagcttgaca

SEQ ID NO: 4028 - RNA, 41 nt, synthetic construct
  source 1..41: mol_type = other RNA
caccaccctgttgctgtagccaaattcgttgccacaccagg

SEQ ID NO: 4029 - RNA, 41 nt, synthetic construct
  source 1..41: mol_type = other RNA
tgtagccaaattcgttgttttaccagacaatgagcttgaca

SEQ ID NO: 4030 - RNA, 41 nt, synthetic construct
  source 1..41: mol_type = other RNA
caccaccctgttgctgtagccaaattcgttgtaacaccagg

SEQ ID NO: 4031 - RNA, 41 nt, synthetic construct
  source 1..41: mol_type = other RNA
caccaccctgttgctgtagccaaatgcgttgtcacaccgga

SEQ ID NO: 4032 - RNA, 41 nt, synthetic construct
  source 1..41: mol_type = other RNA
tgtagccaaattaattgtcacaccaggaaatgagcttgaca

SEQ ID NO: 4033 - RNA, 41 nt, synthetic construct
  source 1..41: mol_type = other RNA
tgtagccaaattcgttctcacaccatgaaacgagcttgaca

SEQ ID NO: 4034 - RNA, 41 nt, synthetic construct
  source 1..41: mol_type = other RNA
caccaccctgttgctgtagccaaattcgttctcacaccaag

SEQ ID NO: 4035 - RNA, 41 nt, synthetic construct
  source 1..41: mol_type = other RNA
tgtagccaaattcgttgtcgcaccaggaaatgagcttgaca

SEQ ID NO: 4036 - RNA, 42 nt, synthetic construct
  source 1..42: mol_type = other RNA
caccaccctgttgctgtagccaaattcgattgtcacacccgg

SEQ ID NO: 4037 - RNA, 41 nt, synthetic construct
  source 1..41: mol_type = other RNA
caccaccctgttgctgtagccacattcgttgtcacacaagg

SEQ ID NO: 4038 - RNA, 41 nt, synthetic construct
  source 1..41: mol_type = other RNA
caccaccctgttgctgtagccaaattcgttgtcacaccagc

SEQ ID NO: 4039 - RNA, 41 nt, synthetic construct
  source 1..41: mol_type = other RNA
tgtagccaaattcgatgtaacaccagtaaatgagcttgaca

SEQ ID NO: 4040 - RNA, 41 nt, synthetic construct
  source 1..41: mol_type = other RNA
caccaccctgttgctgtagccaaattcgttgacacaccagg

SEQ ID NO: 4041 - RNA, 40 nt, synthetic construct
  source 1..40: mol_type = other RNA
caccaccctgttgctgtagccaaatagtcgtcacaccacg

SEQ ID NO: 4042 - RNA, 41 nt, synthetic construct
  source 1..41: mol_type = other RNA
caccaccctgttgctgtagccaaattcgttgtcacacgagg

SEQ ID NO: 4043 - RNA, 41 nt, synthetic construct
  source 1..41: mol_type = other RNA
tgtagccaaattcgttgtcatacccggaaatgagcttgaca

SEQ ID NO: 4044 - RNA, 41 nt, synthetic construct
  source 1..41: mol_type = other RNA
tgtagccaaagtcgttgtcacaccaggaaatgagcttgaca

SEQ ID NO: 4045 - RNA, 41 nt, synthetic construct
  source 1..41: mol_type = other RNA
caccaccctgttgctgtagccaaattcgttgtgacaccagg

SEQ ID NO: 4046 - RNA, 41 nt, synthetic construct
  source 1..41: mol_type = other RNA
tgtagccaaagccgttgtcacaccaggaaatgagcttgaca

SEQ ID NO: 4047 - RNA, 41 nt, synthetic construct
  source 1..41: mol_type = other RNA
caccaccctgttgctgtagccaaattcgttctcacaccaaa

SEQ ID NO: 4048 - RNA, 41 nt, synthetic construct
  source 1..41: mol_type = other RNA
tgtagccaaattcgttgtcttaccagggaatgagcttgaca

SEQ ID NO: 4049 - RNA, 41 nt, synthetic construct
  source 1..41: mol_type = other RNA
tgtagccaaattcgttgtcacacaaggtaatgagcttgaca

SEQ ID NO: 4050 - RNA, 41 nt, synthetic construct
  source 1..41: mol_type = other RNA
caccaccctgttgctgtagccaaattcgttgtcaccacagg

SEQ ID NO: 4051 - RNA, 41 nt, synthetic construct
  source 1..41: mol_type = other RNA
caccaccctgttgctgtagccaaactcgtttacacaccagg

SEQ ID NO: 4052 - RNA, 41 nt, synthetic construct
  source 1..41: mol_type = other RNA
tgtagccaaattcgttggcacaccaggaaatgagcttgaca

SEQ ID NO: 4053 - RNA, 42 nt, synthetic construct
  source 1..42: mol_type = other RNA
tgtagccaaattcgttctcacaccaatacattgagcttgaca

SEQ ID NO: 4054 - RNA, 40 nt, synthetic construct
  source 1..40: mol_type = other RNA
tgtagccaaattcgttgtcacaccaggagggagcttgaca

SEQ ID NO: 4055 - RNA, 41 nt, synthetic construct
  source 1..41: mol_type = other RNA
tgtagccaaattcgttgtcacacaagaaaatgagcttgaca

SEQ ID NO: 4056 - RNA, 41 nt, synthetic construct
  source 1..41: mol_type = other RNA
tgtagccaaatcggttctcacactaggacatgagcttgaca

SEQ ID NO: 4057 - RNA, 41 nt, synthetic construct
  source 1..41: mol_type = other RNA
ttgtcacaccaggaaatgagtttgacaaagtggtcgttgag

SEQ ID NO: 4058 - RNA, 41 nt, synthetic construct
  source 1..41: mol_type = other RNA
caccaccctgttgctgtagccaaattcgtcgtcacaccggg

SEQ ID NO: 4059 - RNA, 42 nt, synthetic construct
  source 1..42: mol_type = other RNA
tgtagccaaattcgttcgtcacaccaagaaatgagcttgaca

SEQ ID NO: 4060 - RNA, 41 nt, synthetic construct
  source 1..41: mol_type = other RNA
tgtagccaaactcgtagtcacaccaggaaatgagcttgaca

SEQ ID NO: 4061 - RNA, 41 nt, synthetic construct
  source 1..41: mol_type = other RNA
caccaccctgttgctgtagccaaattcgtcgtcacaccagg

SEQ ID NO: 4062 - RNA, 41 nt, synthetic construct
  source 1..41: mol_type = other RNA
caccaccctgttgctgtagccaaattcgttttcgcaccagg

SEQ ID NO: 4063 - RNA, 41 nt, synthetic construct
  source 1..41: mol_type = other RNA
caccaccctgttgctgtagccaaagtcgttgtcgcaccagg

SEQ ID NO: 4064 - RNA, 41 nt, synthetic construct
  source 1..41: mol_type = other RNA
caccaccctgttgctgtagccaaatccgttgtcacacctgg

SEQ ID NO: 4065 - RNA, 41 nt, synthetic construct
  source 1..41: mol_type = other RNA
caccaccctgttgctgtagccaaattcgttgtcacaccaag

SEQ ID NO: 4066 - RNA, 41 nt, synthetic construct
  source 1..41: mol_type = other RNA
caccaccctgttgctgtagccaaattcgtcctcacacccgg

SEQ ID NO: 4067 - RNA, 41 nt, synthetic construct
  source 1..41: mol_type = other RNA
caccaccctgttgctgtagccaaattggtttacacacccgg

SEQ ID NO: 4068 - RNA, 41 nt, synthetic construct
  source 1..41: mol_type = other RNA
ttgtcacaccaggtaatgagcttgacaaagtggtcgttgag

SEQ ID NO: 4069 - RNA, 41 nt, synthetic construct
  source 1..41: mol_type = other RNA
tgtagccaaagtcgttgtcacaacaggaaatgagcttgaca

SEQ ID NO: 4070 - RNA, 42 nt, synthetic construct
  source 1..42: mol_type = other RNA
tgtagccaaatttgttgtcacaccacgaaactgagcttgaca

SEQ ID NO: 4071 - RNA, 40 nt, synthetic construct
  source 1..40: mol_type = other RNA
tgtagccaaattcgttgttacaaaggaaatgagcttgaca

SEQ ID NO: 4072 - RNA, 41 nt, synthetic construct
  source 1..41: mol_type = other RNA
tgtagccaaattcgttgtcacacaagtaaatgagcttgaca

SEQ ID NO: 4073 - RNA, 41 nt, synthetic construct
  source 1..41: mol_type = other RNA
tgtagccaaattcgtcgtcacaccggggaaagagcttgaca

SEQ ID NO: 4074 - RNA, 41 nt, synthetic construct
  source 1..41: mol_type = other RNA
caccaccctgttgctgtagccaaattcgttgtcacacaagg

SEQ ID NO: 4075 - RNA, 41 nt, synthetic construct
  source 1..41: mol_type = other RNA
tgtagccaaattccttgtcacaccaggaaatgagcttgaca

SEQ ID NO: 4076 - RNA, 40 nt, synthetic construct
  source 1..40: mol_type = other RNA
tgtagccaaattcgttgtcacaccggaaatgagcttgaca

SEQ ID NO: 4077 - RNA, 41 nt, synthetic construct
  source 1..41: mol_type = other RNA
caccaccctgttgctgtagccaaagtcgttgtcacacaacg

SEQ ID NO: 4078 - RNA, 41 nt, synthetic construct
  source 1..41: mol_type = other RNA
ttgtcacactaggaaatgagcttgacaaagtggtcgttgag

SEQ ID NO: 4079 - RNA, 41 nt, synthetic construct
  source 1..41: mol_type = other RNA
caccaccctgttgctgtagccaaattcattgtcacaccaag

SEQ ID NO: 4080 - RNA, 41 nt, synthetic construct
  source 1..41: mol_type = other RNA
caccaccctgttgctgtagcacaatccgttgtcacaccaag

SEQ ID NO: 4081 - RNA, 41 nt, synthetic construct
  source 1..41: mol_type = other RNA
caccaccctgttgctgtagccatattcgctgttacacaagg

SEQ ID NO: 4082 - RNA, 41 nt, synthetic construct
  source 1..41: mol_type = other RNA
caccaccctgttgctgtagccaaattcgttctcacaccaat

SEQ ID NO: 4083 - RNA, 41 nt, synthetic construct
  source 1..41: mol_type = other RNA
tgtagccaaattcgttatcacacagtgaaatgagcttgaca

SEQ ID NO: 4084 - RNA, 41 nt, synthetic construct
  source 1..41: mol_type = other RNA
caccaccctgttgctgtagccaaattcgtagtcacaccaaa

SEQ ID NO: 4085 - RNA, 41 nt, synthetic construct
  source 1..41: mol_type = other RNA
caccaccctgttgctgtagccaaagccgttgtcacaccagg

SEQ ID NO: 4086 - RNA, 41 nt, synthetic construct
  source 1..41: mol_type = other RNA
tgtagccaaattcggtgtcataccaggaagtgagcttgaca

SEQ ID NO: 4087 - RNA, 41 nt, synthetic construct
  source 1..41: mol_type = other RNA
ttgtcacaccaagaactgagcttgacaaagtggtcgttgag

SEQ ID NO: 4088 - RNA, 36 nt, synthetic construct
  source 1..36: mol_type = other RNA
caccaccctgttgctgtagccaaattcgttgtcggg

SEQ ID NO: 4089 - RNA, 41 nt, synthetic construct
  source 1..41: mol_type = other RNA
caccaccctgttgctgtagccaaattggttgtcataccacg

SEQ ID NO: 4090 - RNA, 50 nt, synthetic construct
  source 1..50: mol_type = other RNA
caccaccctgttgctgtagccatattggtttcacttgctgcccagccagg

SEQ ID NO: 4091 - RNA, 41 nt, synthetic construct
  source 1..41: mol_type = other RNA
caccaccctgttgctgtagccagattcgttgtcttaccagg

SEQ ID NO: 4092 - RNA, 41 nt, synthetic construct
  source 1..41: mol_type = other RNA
caccaccctgttgctgtagccaaattcgttgtcacacccag

SEQ ID NO: 4093 - RNA, 41 nt, synthetic construct
  source 1..41: mol_type = other RNA
caccaccctgttgctgtagccaaattcgttgtcgcaccagg

SEQ ID NO: 4094 - RNA, 42 nt, synthetic construct
  source 1..42: mol_type = other RNA
caccaccctgttgctgtagccaaattcgttcgtcacaccaag

SEQ ID NO: 4095 - RNA, 41 nt, synthetic construct
  source 1..41: mol_type = other RNA
caccaccctgttgctgtagccaaattagttgtcacaccacg

SEQ ID NO: 4096 - RNA, 41 nt, synthetic construct
  source 1..41: mol_type = other RNA
tgtagccaaattcgttgtcacaccaatcaatgagcttgaca

SEQ ID NO: 4097 - RNA, 40 nt, synthetic construct
  source 1..40: mol_type = other RNA
tgtagccaaatttgttgtcacaccacaaatgagcttgaca

SEQ ID NO: 4098 - RNA, 54 nt, synthetic construct
  source 1..54: mol_type = other RNA
caccaccctgttgctgtagccaaattcgttgtcgttgtggatttttccactgtg

SEQ ID NO: 4099 - RNA, 41 nt, synthetic construct
  source 1..41: mol_type = other RNA
tgtagccaaattcgttgtcataccaggaaatgagcttgaca

SEQ ID NO: 4100 - RNA, 41 nt, synthetic construct
  source 1..41: mol_type = other RNA
ttgtcacaccaggaaatgagcttgacaaagtggtcgttgag

SEQ ID NO: 4101 - RNA, 44 nt, synthetic construct
  source 1..44: mol_type = other RNA
caccaccctgttgctgtagccaattgggttgtgacaaaaccagc

SEQ ID NO: 4102 - RNA, 41 nt, synthetic construct
  source 1..41: mol_type = other RNA
tgtagccaaagtcgttgtcacacaacggagtgagcttgaca

SEQ ID NO: 4103 - RNA, 43 nt, synthetic construct
  source 1..43: mol_type = other RNA
tgtagccaaatatcgattgtcacacccaactatgagcttgaca

SEQ ID NO: 4104 - RNA, 41 nt, synthetic construct
  source 1..41: mol_type = other RNA
gtgtcacaccaggaagtgagcttgacaaagtggtcgttgag

SEQ ID NO: 4105 - RNA, 41 nt, synthetic construct
  source 1..41: mol_type = other RNA
tgtagccaaattcgttgtcacacacagaaatgagcttgaca

SEQ ID NO: 4106 - RNA, 41 nt, synthetic construct
  source 1..41: mol_type = other RNA
tgtagccaaattcgtcgtcacaccaggaactgagcttgaca

SEQ ID NO: 4107 - RNA, 41 nt, synthetic construct
  source 1..41: mol_type = other RNA
tgtagccaaattggttgtcataccacgaaatgagcttgaca

SEQ ID NO: 4108 - RNA, 41 nt, synthetic construct
  source 1..41: mol_type = other RNA
caccaccctgttgctgtagccaaattcgttgtcacacaaga

SEQ ID NO: 4109 - RNA, 40 nt, synthetic construct
  source 1..40: mol_type = other RNA
caccaccctgttgctgtagccaaattcttgtcacaccaga

SEQ ID NO: 4110 - RNA, 41 nt, synthetic construct
  source 1..41: mol_type = other RNA
ttgtcacaccaagaaatgagcttgacaaagtggtcgttgag

SEQ ID NO: 4111 - RNA, 41 nt, synthetic construct
  source 1..41: mol_type = other RNA
caccaccctgttgctgtagccagattcgttgtctcaccagg

SEQ ID NO: 4112 - RNA, 41 nt, synthetic construct
  source 1..41: mol_type = other RNA
tgtagccaaattcgttatcacacagagaaatgagcttgaca

SEQ ID NO: 4113 - RNA, 41 nt, synthetic construct
  source 1..41: mol_type = other RNA
ctgtcacaccaggaaatgagcttgacaaagtggtcgttgag

SEQ ID NO: 4114 - RNA, 41 nt, synthetic construct
  source 1..41: mol_type = other RNA
ttgtcacacctggaaatgagcttgacaaagtggtcgttgag

SEQ ID NO: 4115 - RNA, 41 nt, synthetic construct
  source 1..41: mol_type = other RNA
ttgtcacaccgcgaaatacgcttgacaaagtggtcgttgag

SEQ ID NO: 4116 - RNA, 41 nt, synthetic construct
  source 1..41: mol_type = other RNA
caccaccctgttgctgtagccaaattcgttgacacacccgg

SEQ ID NO: 4117 - RNA, 41 nt, synthetic construct
  source 1..41: mol_type = other RNA
caccaccctgttgctgtagccaaattcgttgtcttaccagg

SEQ ID NO: 4118 - RNA, 41 nt, synthetic construct
  source 1..41: mol_type = other RNA
ttgtcacaccgaaaaatgagcttgacaaagtggtcgttgag

SEQ ID NO: 4119 - RNA, 41 nt, synthetic construct
  source 1..41: mol_type = other RNA
caccaccctgttgctgtagccaaattccttgtcataccagg

SEQ ID NO: 4120 - RNA, 41 nt, synthetic construct
  source 1..41: mol_type = other RNA
ttgtcacacccggaaatgagcttgacaaagtggtcgttgag

SEQ ID NO: 4121 - RNA, 41 nt, synthetic construct
  source 1..41: mol_type = other RNA
caccaccctgttgctgtagccaaattcgtcgtcacacaagg

SEQ ID NO: 4122 - RNA, 41 nt, synthetic construct
  source 1..41: mol_type = other RNA
caccaccctgttgctgtagccaaattagttgtcacaccgaa

SEQ ID NO: 4123 - RNA, 41 nt, synthetic construct
  source 1..41: mol_type = other RNA
caccaccctgttgctgtagccaaattcattgtcacaccccg

SEQ ID NO: 4124 - RNA, 57 nt, synthetic construct
  source 1..57: mol_type = other RNA
caccaccctgttgctgtagccacattcgatcttgtgtcactccaacttccgcccagg

SEQ ID NO: 4125 - RNA, 42 nt, synthetic construct
  source 1..42: mol_type = other RNA
tgtagccaaattcgtatgtcataccaggcagtgagcttgaca

SEQ ID NO: 4126 - RNA, 41 nt, synthetic construct
  source 1..41: mol_type = other RNA
caccaccctgttgctgtagccaaactcgttgtcacacccgg

SEQ ID NO: 4127 - RNA, 41 nt, synthetic construct
  source 1..41: mol_type = other RNA
tgtagccaaattcgttgtcattccgggaagtgagcttgaca

SEQ ID NO: 4128 - RNA, 40 nt, synthetic construct
  source 1..40: mol_type = other RNA
ttgtcacaccaggagggagcttgacaaagtggtcgttgag

SEQ ID NO: 4129 - RNA, 42 nt, synthetic construct
  source 1..42: mol_type = other RNA
caccaccctgttgctgtagccgaattcgtatgtcataccagg

SEQ ID NO: 4130 - RNA, 41 nt, synthetic construct
  source 1..41: mol_type = other RNA
caccaccctgttgctgtagccaaattcgttgacccaccagg

SEQ ID NO: 4131 - RNA, 41 nt, synthetic construct
  source 1..41: mol_type = other RNA
ttgtcacaccaggagatgagcttgacaaagtggtcgttgag

SEQ ID NO: 4132 - RNA, 40 nt, synthetic construct
  source 1..40: mol_type = other RNA
caccaccctgttgctgtagccatattcgttgtcataccgg

SEQ ID NO: 4133 - RNA, 40 nt, synthetic construct
  source 1..40: mol_type = other RNA
tgtagccaaattcgttgtcataccggaaatgagcttgaca

SEQ ID NO: 4134 - RNA, 41 nt, synthetic construct
  source 1..41: mol_type = other RNA
caccaccctgttgctgtagccaaattcgttgtcacacccgg

SEQ ID NO: 4135 - RNA, 41 nt, synthetic construct
  source 1..41: mol_type = other RNA
ttgacacaccaggaaatgagattgacaaagtggtcgttgag

SEQ ID NO: 4136 - RNA, 40 nt, synthetic construct
  source 1..40: mol_type = other RNA
ttgtcacaccgggaaatggcttgacaaagtggtcgttgag

SEQ ID NO: 4137 - RNA, 41 nt, synthetic construct
  source 1..41: mol_type = other RNA
tgtagccaaattcgtcgtcacaccaggaaatgagcttgaca

SEQ ID NO: 4138 - RNA, 41 nt, synthetic construct
  source 1..41: mol_type = other RNA
tgtagccaaattcgtcgtcacacaaggagatgagcttgaca

SEQ ID NO: 4139 - RNA, 42 nt, synthetic construct
  source 1..42: mol_type = other RNA
caccaccctgttgctgtagccaaattatgttgtcgcaccagg

SEQ ID NO: 4140 - RNA, 41 nt, synthetic construct
  source 1..41: mol_type = other RNA
ttgtcacaccagggagtgagcttgacaaagtggtcgttgag

SEQ ID NO: 4141 - RNA, 42 nt, synthetic construct
  source 1..42: mol_type = other RNA
caccaccctgttgctgtagcgaatatcgattgtcacacccaa

SEQ ID NO: 4142 - RNA, 41 nt, synthetic construct
  source 1..41: mol_type = other RNA
caccaccctgttgctgtagccaaactccttgtcgcaccaaa

SEQ ID NO: 4143 - RNA, 41 nt, synthetic construct
  source 1..41: mol_type = other RNA
tgtagccaaattcggtgtcgcaccaggagatgagcttgaca

SEQ ID NO: 4144 - RNA, 41 nt, synthetic construct
  source 1..41: mol_type = other RNA
tcgtcacaccacgaaatgagcttgacaaagtggtcgttgag

SEQ ID NO: 4145 - RNA, 41 nt, synthetic construct
  source 1..41: mol_type = other RNA
ttgtcacaacaggaaatgagcttgacaaagtggtcgttgag

SEQ ID NO: 4146 - RNA, 42 nt, synthetic construct
  source 1..42: mol_type = other RNA
tatgtcataccaggcagtgagcttgacaaagtggtcgttgag

SEQ ID NO: 4147 - RNA, 41 nt, synthetic construct
  source 1..41: mol_type = other RNA
ttgtcacaccaatcaatgatcttgacaaagtggtcgttgag

SEQ ID NO: 4148 - RNA, 41 nt, synthetic construct
  source 1..41: mol_type = other RNA
caccaccctgttgctgtagccaaattcgttgtcacaccaat

SEQ ID NO: 4149 - RNA, 44 nt, synthetic construct
  source 1..44: mol_type = other RNA
caccaccctgttgctgtagccaaattcgttaaaatcacacctgg

SEQ ID NO: 4150 - RNA, 41 nt, synthetic construct
  source 1..41: mol_type = other RNA
tgtagccaaattcgttgtcgcaccagggaatgagcttgaca

SEQ ID NO: 4151 - RNA, 41 nt, synthetic construct
  source 1..41: mol_type = other RNA
ttgtcacaccaggaaatgcgcttgacaaagtggtcgttgag

SEQ ID NO: 4152 - RNA, 42 nt, synthetic construct
  source 1..42: mol_type = other RNA
caccaccctgttgctgtagccaaattccttgacacaaccagg

SEQ ID NO: 4153 - RNA, 41 nt, synthetic construct
  source 1..41: mol_type = other RNA
tcctcacacccggaaatgagcttgacaaagtggtcgttgag

SEQ ID NO: 4154 - RNA, 41 nt, synthetic construct
  source 1..41: mol_type = other RNA
caccaccctgttgctgtagccaaattcgttgtctcaccagg

SEQ ID NO: 4155 - RNA, 41 nt, synthetic construct
  source 1..41: mol_type = other RNA
caccaccctgttgctgtagccaaattagttgtctcaccagg

SEQ ID NO: 4156 - RNA, 41 nt, synthetic construct
  source 1..41: mol_type = other RNA
caccaccctgttgctgtagccaaagtcgttgtaacaccagg

SEQ ID NO: 4157 - RNA, 41 nt, synthetic construct
  source 1..41: mol_type = other RNA
ttgtcacactagaaaatgggcttgacaaagtggtcgttgag

SEQ ID NO: 4158 - RNA, 41 nt, synthetic construct
  source 1..41: mol_type = other RNA
ttgtcttaccagggaatgagcttgacaaagtggtcgttgag

SEQ ID NO: 4159 - RNA, 41 nt, synthetic construct
  source 1..41: mol_type = other RNA
caccaccctgttgctgtagccaaattcgttttcacatcagg

SEQ ID NO: 4160 - RNA, 41 nt, synthetic construct
  source 1..41: mol_type = other RNA
tgtagccaaattcgttgacccactaggaaatgagcttgaca

SEQ ID NO: 4161 - RNA, 41 nt, synthetic construct
  source 1..41: mol_type = other RNA
caccaccctgttgctgtagccaaattcgatgtaacaccagt

SEQ ID NO: 4162 - RNA, 41 nt, synthetic construct
  source 1..41: mol_type = other RNA
caccaccctgttgctgtagccaaattcgttgtcatcaacgg

SEQ ID NO: 4163 - RNA, 42 nt, synthetic construct
  source 1..42: mol_type = other RNA
ttgtcacaccaggaaatgaggcttgacaaagtggtcgttgag

SEQ ID NO: 4164 - RNA, 41 nt, synthetic construct
  source 1..41: mol_type = other RNA
tgtagccaaattcgttgtctcaccagggaatgagcttgaca

SEQ ID NO: 4165 - RNA, 41 nt, synthetic construct
  source 1..41: mol_type = other RNA
caccaccctgttgctgtagccaaattcgttgtcttaccaga

SEQ ID NO: 4166 - RNA, 41 nt, synthetic construct
  source 1..41: mol_type = other RNA
caccaccctgttgctgtagccaaattcgttatcacacagtg

SEQ ID NO: 4167 - RNA, 41 nt, synthetic construct
  source 1..41: mol_type = other RNA
tgtagccaaattcgttctcataccaggaaatgagcttgaca

SEQ ID NO: 4168 - RNA, 41 nt, synthetic construct
  source 1..41: mol_type = other RNA
ttctcacaccaggaaatgagcttgacaaagtggtcgttgag

SEQ ID NO: 4169 - RNA, 41 nt, synthetic construct
  source 1..41: mol_type = other RNA
tgtagccaaattcgctgtcacacgttaggatgagcttgaca

SEQ ID NO: 4170 - RNA, 40 nt, synthetic construct
  source 1..40: mol_type = other RNA
tgtagccaaattcttgtcacaccagaaaatgagcttgaca

SEQ ID NO: 4171 - RNA, 41 nt, synthetic construct
  source 1..41: mol_type = other RNA
caccaccctgttgctgtagccaaattcgttctcataccagg

SEQ ID NO: 4172 - RNA, 41 nt, synthetic construct
  source 1..41: mol_type = other RNA
caccaccctgttgctgtagccaaattcgttgtcataccagg

SEQ ID NO: 4173 - RNA, 41 nt, synthetic construct
  source 1..41: mol_type = other RNA
ttatcacaccaggaaatgagcttgacaaagtggtcgttgag

SEQ ID NO: 4174 - RNA, 41 nt, synthetic construct
  source 1..41: mol_type = other RNA
ttgtcacactaagagatgagcttgacaaagtggtcgttgag

SEQ ID NO: 4175 - RNA, 41 nt, synthetic construct
  source 1..41: mol_type = other RNA
ttgtcacaccacgaaatgagtttgacaaagtggtcgttgag

SEQ ID NO: 4176 - RNA, 41 nt, synthetic construct
  source 1..41: mol_type = other RNA
ttgtcacaccagggaatgggcttgacaaagtggtcgttgag

SEQ ID NO: 4177 - RNA, 49 nt, synthetic construct
  source 1..49: mol_type = other RNA
tgtagccaaattcgttaaaatcacacctggagcaagaatgagcttgaca

SEQ ID NO: 4178 - RNA, 41 nt, synthetic construct
  source 1..41: mol_type = other RNA
tgtagccaaattagttgtctcaccaggaaatgagcttgaca

SEQ ID NO: 4179 - RNA, 41 nt, synthetic construct
  source 1..41: mol_type = other RNA
ttgtcacaccaggaaatggtcttgacaaagtggtcgttgag

SEQ ID NO: 4180 - RNA, 41 nt, synthetic construct
  source 1..41: mol_type = other RNA
caccaccctgttgctgtagccaaattcgttgtctcaccaga

SEQ ID NO: 4181 - RNA, 42 nt, synthetic construct
  source 1..42: mol_type = other RNA
tgtagccaaattatgttgtcgcaccaggtaacgagcttgaca

SEQ ID NO: 4182 - RNA, 44 nt, synthetic construct
  source 1..44: mol_type = other RNA
caccaccctgttgctgtagccaattgggttgtgaaaaaaccagc

SEQ ID NO: 4183 - RNA, 41 nt, synthetic construct
  source 1..41: mol_type = other RNA
caccaccctgttgctgtagccaaagtcgttgtcacaaaagg

SEQ ID NO: 4184 - RNA, 41 nt, synthetic construct
  source 1..41: mol_type = other RNA
ttgtcacaccgggaaatgaacttgacaaagtggtcgttgag

SEQ ID NO: 4185 - RNA, 41 nt, synthetic construct
  source 1..41: mol_type = other RNA
caccaccctgttgctgtagccaaattcgttgtcgtaccagg

SEQ ID NO: 4186 - RNA, 41 nt, synthetic construct
  source 1..41: mol_type = other RNA
tgtagccaaattcgttgtcgcaccaggaagagagcttgaca

SEQ ID NO: 4187 - RNA, 40 nt, synthetic construct
  source 1..40: mol_type = other RNA
tgtagccaaatagtcgtcacaccacgaaatgagcttgaca

SEQ ID NO: 4188 - RNA, 41 nt, synthetic construct
  source 1..41: mol_type = other RNA
ttgtcacaccagggagtacgcttgacaaagtggtcgttgag

SEQ ID NO: 4189 - RNA, 40 nt, synthetic construct
  source 1..40: mol_type = other RNA
ttgtcacaccacaaatgagcttgacaaagtggtcgttgag

SEQ ID NO: 4190 - RNA, 54 nt, synthetic construct
  source 1..54: mol_type = other RNA
caccaccctgttgctgtagccaaattcgttttcacacccatacaccaccacacg

SEQ ID NO: 4191 - RNA, 43 nt, synthetic construct
  source 1..43: mol_type = other RNA
caccaccctgttgctgtagccaaattcgctgtcacacgtcagg

SEQ ID NO: 4192 - RNA, 41 nt, synthetic construct
  source 1..41: mol_type = other RNA
caccaccctgttgctgtagccaaattcggtgtcataccagg

SEQ ID NO: 4193 - RNA, 42 nt, synthetic construct
  source 1..42: mol_type = other RNA
tgtagccaaattcgtcgtcacaccaggaaaatgagcttgaca

SEQ ID NO: 4194 - RNA, 40 nt, synthetic construct
  source 1..40: mol_type = other RNA
caccaccctgttgctgtagccaaattcgttgttacaaagg

SEQ ID NO: 4195 - RNA, 42 nt, synthetic construct
  source 1..42: mol_type = other RNA
caccaccctgttgctgtagccaaattatgttgtcgtaccagg

SEQ ID NO: 4196 - RNA, 41 nt, synthetic construct
  source 1..41: mol_type = other RNA
tgtagccaaattcgttgtttcaccagacaatgagcttgaca

SEQ ID NO: 4197 - RNA, 42 nt, synthetic construct
  source 1..42: mol_type = other RNA
caccaccctgttgctgtagccaaattacttgtcacaaccagg

SEQ ID NO: 4198 - RNA, 41 nt, synthetic construct
  source 1..41: mol_type = other RNA
ttctcacaccaggaaatgcgtttgacaaagtggtcgttgag

SEQ ID NO: 4199 - RNA, 41 nt, synthetic construct
  source 1..41: mol_type = other RNA
caccaccctgttgctgtagccaaattagttgtcttaccagg

SEQ ID NO: 4200 - RNA, 41 nt, synthetic construct
  source 1..41: mol_type = other RNA
tgtagccaaattcgttttcgcactaggaaatgagcttgaca

SEQ ID NO: 4201 - RNA, 41 nt, synthetic construct
  source 1..41: mol_type = other RNA
ttgtcacaccaggtcctgagcttgacaaagtggtcgttgag

SEQ ID NO: 4202 - RNA, 41 nt, synthetic construct
  source 1..41: mol_type = other RNA
caccaccctgttgctgtagccaaattcgttgtcacaccacg

SEQ ID NO: 4203 - RNA, 42 nt, synthetic construct
  source 1..42: mol_type = other RNA
caccaccctgttgctgtagccatattcgctgtcacaaccagg

SEQ ID NO: 4204 - RNA, 41 nt, synthetic construct
  source 1..41: mol_type = other RNA
ttatcacaccgggaaacgagcttgacaaagtggtcgttgag

SEQ ID NO: 4205 - RNA, 41 nt, synthetic construct
  source 1..41: mol_type = other RNA
ttgtcgcaccagggaatgagcttgacaaagtggtcgttgag

SEQ ID NO: 4206 - RNA, 54 nt, synthetic construct
  source 1..54: mol_type = other RNA
tgtagccaaattcgttttcacacccatacaccaccacacgttatgagcttgaca

SEQ ID NO: 4207 - RNA, 41 nt, synthetic construct
  source 1..41: mol_type = other RNA
tgtagccaaactccttgtcgcaccaaaaaatgagcttgaca

SEQ ID NO: 4208 - RNA, 41 nt, synthetic construct
  source 1..41: mol_type = other RNA
ttgtcacaccaggaagtcagcttgacaaagtggtcgttgag

SEQ ID NO: 4209 - RNA, 41 nt, synthetic construct
  source 1..41: mol_type = other RNA
caccaccctgttgctgtagccaaattcgttatcacagcctg

SEQ ID NO: 4210 - RNA, 41 nt, synthetic construct
  source 1..41: mol_type = other RNA
ttgtcacaccaggaaatgagattgacaaagtggtcgttgag

SEQ ID NO: 4211 - RNA, 42 nt, synthetic construct
  source 1..42: mol_type = other RNA
tgtagccaaattacttgtcacaaccaggaaatgagcttgaca

SEQ ID NO: 4212 - RNA, 41 nt, synthetic construct
  source 1..41: mol_type = other RNA
ttgtcacactaagaaatgagcttgacaaagtggtcgttgag

SEQ ID NO: 4213 - RNA, 41 nt, synthetic construct
  source 1..41: mol_type = other RNA
tgtagccaaagtcgttgtcacaaaaggaaatgagcttgaca

SEQ ID NO: 4214 - RNA, 41 nt, synthetic construct
  source 1..41: mol_type = other RNA
ttgtcacaccaggaaatgaggttgacaaagtggtcgttgag

SEQ ID NO: 4215 - RNA, 42 nt, synthetic construct
  source 1..42: mol_type = other RNA
tatgtcacaccaggcagtgagcttgacaaagtggtcgttgag

SEQ ID NO: 4216 - RNA, 41 nt, synthetic construct
  source 1..41: mol_type = other RNA
ttgtcacaccggacaatgagcttgacaaagtggtcgttgag

SEQ ID NO: 4217 - RNA, 41 nt, synthetic construct
  source 1..41: mol_type = other RNA
ttgccacactaggttatgagtttgacaaagtggtcgttgag

SEQ ID NO: 4218 - RNA, 41 nt, synthetic construct
  source 1..41: mol_type = other RNA
ttgtaacaccaggaaatgggcttgacaaagtggtcgttgag

SEQ ID NO: 4219 - RNA, 41 nt, synthetic construct
  source 1..41: mol_type = other RNA
ttgtcacaacaggaaatgagtttgacaaagtggtcgttgag

SEQ ID NO: 4220 - RNA, 41 nt, synthetic construct
  source 1..41: mol_type = other RNA
tgtagccaaagtcgttgtcgcaccaggaaacgagcttgaca

SEQ ID NO: 4221 - RNA, 49 nt, synthetic construct
  source 1..49: mol_type = other RNA
tgtagccaaattcgttaaatcacacccaaaggaacaaatgagcttgaca

SEQ ID NO: 4222 - RNA, 41 nt, synthetic construct
  source 1..41: mol_type = other RNA
ttgtcacactacgaaatgagcttgacaaagtggtcgttgag

SEQ ID NO: 4223 - RNA, 40 nt, synthetic construct
  source 1..40: mol_type = other RNA
caccaccctgttgctgtagccaaattcgttgtctcgcaca

SEQ ID NO: 4224 - RNA, 41 nt, synthetic construct
  source 1..41: mol_type = other RNA
tggtcacaccaggaaatgagcttgacaaagtggtcgttgag

SEQ ID NO: 4225 - RNA, 41 nt, synthetic construct
  source 1..41: mol_type = other RNA
caccaccctgttgctgtagccaaattcgttgtcaccaacgg

SEQ ID NO: 4226 - RNA, 41 nt, synthetic construct
  source 1..41: mol_type = other RNA
tcgtcacaccaggaaatgagtttgacaaagtggtcgttgag

SEQ ID NO: 4227 - RNA, 41 nt, synthetic construct
  source 1..41: mol_type = other RNA
ttgtcacaccaagaaatgagtttgacaaagtggtcgttgag

SEQ ID NO: 4228 - RNA, 41 nt, synthetic construct
  source 1..41: mol_type = other RNA
tgtagccaaattcgttgtcgtaccaggaagagagcttgaca

SEQ ID NO: 4229 - RNA, 42 nt, synthetic construct
  source 1..42: mol_type = other RNA
ttcgtcacaccaagaaatgagcttgacaaagtggtcgttgag

SEQ ID NO: 4230 - RNA, 42 nt, synthetic construct
  source 1..42: mol_type = other RNA
caccaccctgttgctgtagccaaattcgcgtgttccaccagg

SEQ ID NO: 4231 - RNA, 41 nt, synthetic construct
  source 1..41: mol_type = other RNA
caccaccctgttgctgtagccaaattcgttgtcactccagg

SEQ ID NO: 4232 - RNA, 41 nt, synthetic construct
  source 1..41: mol_type = other RNA
ttgtcacacccggaaatgaacttgacaaagtggtcgttgag

SEQ ID NO: 4233 - RNA, 41 nt, synthetic construct
  source 1..41: mol_type = other RNA
ttgttacaccaggaaatgaaattgacaaagtggtcgttgag

SEQ ID NO: 4234 - RNA, 41 nt, synthetic construct
  source 1..41: mol_type = other RNA
ttgtcacaccaggaattggggttgacaaagtggtcgttgag

SEQ ID NO: 4235 - RNA, 41 nt, synthetic construct
  source 1..41: mol_type = other RNA
tgtagccaaattcgttgtcactccgggaagtgagcttgaca

SEQ ID NO: 4236 - RNA, 41 nt, synthetic construct
  source 1..41: mol_type = other RNA
caccaccctgttgctgtagccaaattcgttgtcacacacag

SEQ ID NO: 4237 - RNA, 47 nt, synthetic construct
  source 1..47: mol_type = other RNA
caccaccctgttgctgtagccccaaattcgttagtcacaccagaacg

SEQ ID NO: 4238 - RNA, 41 nt, synthetic construct
  source 1..41: mol_type = other RNA
ttgtcacaccaggaagtgtgattgacaaagtggtcgttgag

SEQ ID NO: 4239 - RNA, 41 nt, synthetic construct
  source 1..41: mol_type = other RNA
ttgtcacaccgggaatctagcttgacaaagtggtcgttgag

SEQ ID NO: 4240 - RNA, 41 nt, synthetic construct
  source 1..41: mol_type = other RNA
ttgtcacaacgggaaatgagcttgacaaagtggtcgttgag

SEQ ID NO: 4241 - RNA, 41 nt, synthetic construct
  source 1..41: mol_type = other RNA
ttgtcacaccacgaaatgcgcttgacaaagtggtcgttgag

SEQ ID NO: 4242 - RNA, 43 nt, synthetic construct
  source 1..43: mol_type = other RNA
ttgttacaccaggctgagatgagttgacaaagtggtcgttgag

SEQ ID NO: 4243 - RNA, 41 nt, synthetic construct
  source 1..41: mol_type = other RNA
ttgtcacaccaggaaatgcgattgacaaagtggtcgttgag

SEQ ID NO: 4244 - RNA, 41 nt, synthetic construct
  source 1..41: mol_type = other RNA
caccaccctgttgctgtagccaaattcgttatcacacagag

SEQ ID NO: 4245 - RNA, 42 nt, synthetic construct
  source 1..42: mol_type = other RNA
caccaccctgttgctgtagccaaattccttgacataaccagg

SEQ ID NO: 4246 - RNA, 41 nt, synthetic construct
  source 1..41: mol_type = other RNA
ttgtcacaccaggaagtgaggttgacaaagtggtcgttgag

SEQ ID NO: 4247 - RNA, 41 nt, synthetic construct
  source 1..41: mol_type = other RNA
caccaccctgttgctgtagccagtttcgttgtcactccagg

SEQ ID NO: 4248 - RNA, 48 nt, synthetic construct
  source 1..48: mol_type = other RNA
caccaccctgttgctgtagccaaattcgttgtcactcccagacaaagg

SEQ ID NO: 4249 - RNA, 41 nt, synthetic construct
  source 1..41: mol_type = other RNA
ttgtcacaccgggaaatgagattgacaaagtggtcgttgag

SEQ ID NO: 4250 - RNA, 41 nt, synthetic construct
  source 1..41: mol_type = other RNA
caccaccctgttgctgtagccaaattcgttgtcatacccgg

SEQ ID NO: 4251 - RNA, 41 nt, synthetic construct
  source 1..41: mol_type = other RNA
caccaccctgttgctgtagccaaattcgttgtcacacaagt

SEQ ID NO: 4252 - RNA, 41 nt, synthetic construct
  source 1..41: mol_type = other RNA
tgtagccaaattagttgtctcaccaggcaatgagcttgaca

SEQ ID NO: 4253 - RNA, 41 nt, synthetic construct
  source 1..41: mol_type = other RNA
tgtagccaaattcgttatcaccacagcaaatgagcttgaca

SEQ ID NO: 4254 - RNA, 41 nt, synthetic construct
  source 1..41: mol_type = other RNA
caccaccctgttgctgtagcaaaagtcgttgtcataccgga

SEQ ID NO: 4255 - RNA, 41 nt, synthetic construct
  source 1..41: mol_type = other RNA
tgtagccaaattcgttgtcacttcagggaatgagcttgaca

SEQ ID NO: 4256 - RNA, 41 nt, synthetic construct
  source 1..41: mol_type = other RNA
ttgtcacaccgggcagtgaggttgacaaagtggtcgttgag

SEQ ID NO: 4257 - RNA, 41 nt, synthetic construct
  source 1..41: mol_type = other RNA
caccaccctgttgctgtagccaaattcgtcgtcctcaacgg

SEQ ID NO: 4258 - RNA, 41 nt, synthetic construct
  source 1..41: mol_type = other RNA
ttgacacacccgggaatgagcttgacaaagtggtcgttgag

SEQ ID NO: 4259 - RNA, 40 nt, synthetic construct
  source 1..40: mol_type = other RNA
ttgtcacaccgggaatgagattgacaaagtggtcgttgag

SEQ ID NO: 4260 - RNA, 54 nt, synthetic construct
  source 1..54: mol_type = other RNA
caccaccctgttgctgtagccaaattcgttgtcgctgtggatttttccactgtg

SEQ ID NO: 4261 - RNA, 41 nt, synthetic construct
  source 1..41: mol_type = other RNA
caccaccctgttgctgtagccaaattggatgtcatggtgga

SEQ ID NO: 4262 - RNA, 38 nt, synthetic construct
  source 1..38: mol_type = other RNA
aatcaccaggaaatgagcttgacaaagtggtcgttgag

SEQ ID NO: 4263 - RNA, 41 nt, synthetic construct
  source 1..41: mol_type = other RNA
tagtcacaccaggaaatgagtttgacaaagtggtcgttgag

SEQ ID NO: 4264 - RNA, 41 nt, synthetic construct
  source 1..41: mol_type = other RNA
caccaccctgttgctgtagccaaaatcgttgtcacatcagg

SEQ ID NO: 4265 - RNA, 41 nt, synthetic construct
  source 1..41: mol_type = other RNA
ttgtcacacccagaactgagcttgacaaagtggtcgttgag

SEQ ID NO: 4266 - RNA, 41 nt, synthetic construct
  source 1..41: mol_type = other RNA
ttgtctcaccagggaatgagcttgacaaagtggtcgttgag

SEQ ID NO: 4267 - RNA, 46 nt, synthetic construct
  source 1..46: mol_type = other RNA
caccaccctgttgctgtagccaaattcgttgtgaaatacaaccagg

SEQ ID NO: 4268 - RNA, 41 nt, synthetic construct
  source 1..41: mol_type = other RNA
caccaccctgttgctgtagccaaattcgttgtcacgccagg

SEQ ID NO: 4269 - RNA, 41 nt, synthetic construct
  source 1..41: mol_type = other RNA
ttgtaacaccaggaaatgaacttgacaaagtggtcgttgag

SEQ ID NO: 4270 - RNA, 40 nt, synthetic construct
  source 1..40: mol_type = other RNA
ttgtcacaccggaaatgagtttgacaaagtggtcgttgag

SEQ ID NO: 4271 - RNA, 41 nt, synthetic construct
  source 1..41: mol_type = other RNA
caccaccctgttgctgtagccaaattcggtgtcgtaccagg

SEQ ID NO: 4272 - RNA, 42 nt, synthetic construct
  source 1..42: mol_type = other RNA
caccaccctgttgctgtagccaaattcgtatggaccaccaaa

SEQ ID NO: 4273 - RNA, 41 nt, synthetic construct
  source 1..41: mol_type = other RNA
ctgttacaccaggatatgagcttgacaaagtggtcgttgag

SEQ ID NO: 4274 - RNA, 41 nt, synthetic construct
  source 1..41: mol_type = other RNA
ttgtcacaccagggggtacgcttgacaaagtggtcgttgag

SEQ ID NO: 4275 - RNA, 41 nt, synthetic construct
  source 1..41: mol_type = other RNA
caccaccctgttgctgtagccaaattcgcgatcactccagg

SEQ ID NO: 4276 - RNA, 41 nt, synthetic construct
  source 1..41: mol_type = other RNA
ttgtcacgccaggaaatgagcttgacaaagtggtcgttgag

SEQ ID NO: 4277 - RNA, 41 nt, synthetic construct
  source 1..41: mol_type = other RNA
ttgtcacaccaggaaatcaaattgacaaagtggtcgttgag

SEQ ID NO: 4278 - RNA, 41 nt, synthetic construct
  source 1..41: mol_type = other RNA
ttgtcgcaccaggaagagagcttgacaaagtggtcgttgag

SEQ ID NO: 4279 - RNA, 41 nt, synthetic construct
  source 1..41: mol_type = other RNA
tgtagccaaattcgttttcacattaggaattgagcttgaca

SEQ ID NO: 4280 - RNA, 41 nt, synthetic construct
  source 1..41: mol_type = other RNA
ttgtcacacacggaaatgagcttgacaaagtggtcgttgag

SEQ ID NO: 4281 - RNA, 41 nt, synthetic construct
  source 1..41: mol_type = other RNA
ttggcacaccaggaaatgagattgacaaagtggtcgttgag

SEQ ID NO: 4282 - RNA, 41 nt, synthetic construct
  source 1..41: mol_type = other RNA
ttgtcacactaggaaatgggtttgacaaagtggtcgttgag

SEQ ID NO: 4283 - RNA, 41 nt, synthetic construct
  source 1..41: mol_type = other RNA
tgtagccaaattagttgtcttaccaggcaatgagcttgaca

SEQ ID NO: 4284 - RNA, 41 nt, synthetic construct
  source 1..41: mol_type = other RNA
caccaccctgttgctgtagccaaattcgttgtcattccagg

SEQ ID NO: 4285 - RNA, 41 nt, synthetic construct
  source 1..41: mol_type = other RNA
ttctcacaccaggaaatgcgcttgacaaagtggtcgttgag

SEQ ID NO: 4286 - RNA, 41 nt, synthetic construct
  source 1..41: mol_type = other RNA
tgtagccaaattcgcgtgttcaccaggaaatgagcttgaca

SEQ ID NO: 4287 - RNA, 36 nt, synthetic construct
  source 1..36: mol_type = other RNA
caccaccctgttgctgtagccaagtatgttgtcaga

SEQ ID NO: 4288 - RNA, 41 nt, synthetic construct
  source 1..41: mol_type = other RNA
ttgtcacaccacgaaacgagtttgacaaagtggtcgttgag

SEQ ID NO: 4289 - RNA, 41 nt, synthetic construct
  source 1..41: mol_type = other RNA
ttgtcacaccaggaaatgaaattgacaaagtggtcgttgag

SEQ ID NO: 4290 - RNA, 41 nt, synthetic construct
  source 1..41: mol_type = other RNA
ttatcatcacagcaaatgagcttgacaaagtggtcgttgag

SEQ ID NO: 4291 - RNA, 41 nt, synthetic construct
  source 1..41: mol_type = other RNA
tgtagccaaattcgttatcacagcctgaagtgagcttgaca

SEQ ID NO: 4292 - RNA, 41 nt, synthetic construct
  source 1..41: mol_type = other RNA
caccaccctgttgctgtagccaaatgtgttgtaacgccggg

SEQ ID NO: 4293 - RNA, 41 nt, synthetic construct
  source 1..41: mol_type = other RNA
tcgtcacaccgggaaacgagcttgacaaagtggtcgttgag

SEQ ID NO: 4294 - RNA, 41 nt, synthetic construct
  source 1..41: mol_type = other RNA
caccaccctgttgctgtagccaaatagttgtcacaaccagg

SEQ ID NO: 4295 - RNA, 42 nt, synthetic construct
  source 1..42: mol_type = other RNA
caccaccctgttgctgtagccaaattcgctgtcacaaccagg

SEQ ID NO: 4296 - RNA, 41 nt, synthetic construct
  source 1..41: mol_type = other RNA
caccaccctgttgctgtagccaaagtcgttgtcactctagg

SEQ ID NO: 4297 - RNA, 41 nt, synthetic construct
  source 1..41: mol_type = other RNA
caccaccctgttgctgtagccaaattcgttatcacgccagg

SEQ ID NO: 4298 - RNA, 41 nt, synthetic construct
  source 1..41: mol_type = other RNA
ttgtcacaccaagaagtgtcgttgacaaagtggtcgttgag

SEQ ID NO: 4299 - RNA, 41 nt, synthetic construct
  source 1..41: mol_type = other RNA
caccaccctgttgctgtagccaaattcgttgtcagactaga

SEQ ID NO: 4300 - RNA, 41 nt, synthetic construct
  source 1..41: mol_type = other RNA
caccaccctgttgctgtagccaaattcgttgtcatcacagg

SEQ ID NO: 4301 - RNA, 48 nt, synthetic construct
  source 1..48: mol_type = other RNA
caccaccctgttgctgtagcctcaaattcgttaaatcaaacccaaagg

SEQ ID NO: 4302 - RNA, 41 nt, synthetic construct
  source 1..41: mol_type = other RNA
caccaccctgttgctgtagccaaattagttgtcacacacgg

SEQ ID NO: 4303 - RNA, 41 nt, synthetic construct
  source 1..41: mol_type = other RNA
caccaccctgttgctgtagccaatttcgttgtcatgccagg

SEQ ID NO: 4304 - RNA, 41 nt, synthetic construct
  source 1..41: mol_type = other RNA
ttgtcacacaaggtaatgagcttgacaaagtggtcgttgag

SEQ ID NO: 4305 - RNA, 41 nt, synthetic construct
  source 1..41: mol_type = other RNA
ttgtcacaccacgaaatgagattgacaaagtggtcgttgag

SEQ ID NO: 4306 - RNA, 41 nt, synthetic construct
  source 1..41: mol_type = other RNA
gtgtcgcaccaggagatgagcttgacaaagtggtcgttgag

SEQ ID NO: 4307 - RNA, 42 nt, synthetic construct
  source 1..42: mol_type = other RNA
tgtagccaaattcgcgtgttccaccaggaaatgagcttgaca

SEQ ID NO: 4308 - RNA, 42 nt, synthetic construct
  source 1..42: mol_type = other RNA
ctgtcacaaccaggaaatgagcttgacaaagtggtcgttgag

SEQ ID NO: 4309 - RNA, 42 nt, synthetic construct
  source 1..42: mol_type = other RNA
tgtagccaaattcgctgtcacaaccaggaaatgagcttgaca

SEQ ID NO: 4310 - RNA, 41 nt, synthetic construct
  source 1..41: mol_type = other RNA
ttgtcacaccacgaaactggcttgacaaagtggtcgttgag

SEQ ID NO: 4311 - RNA, 41 nt, synthetic construct
  source 1..41: mol_type = other RNA
caccaccctgttgctgtagccaaattcgtatggacaccaaa

SEQ ID NO: 4312 - RNA, 41 nt, synthetic construct
  source 1..41: mol_type = other RNA
ttgtcacacccggcaatgtaattgacaaagtggtcgttgag

SEQ ID NO: 4313 - RNA, 41 nt, synthetic construct
  source 1..41: mol_type = other RNA
tgtagccaaattcgttgtcatgccaggaaatgagcttgaca

SEQ ID NO: 4314 - RNA, 41 nt, synthetic construct
  source 1..41: mol_type = other RNA
caccaccctgttgctgtagccacattcgttatcaccacagc

SEQ ID NO: 4315 - RNA, 41 nt, synthetic construct
  source 1..41: mol_type = other RNA
tcgtcacaccaggaaatgagcttgacaaagtggtcgttgag

SEQ ID NO: 4316 - RNA, 41 nt, synthetic construct
  source 1..41: mol_type = other RNA
caccaccctgttgctgtagcgaaattcgttgtaacacccag

SEQ ID NO: 4317 - RNA, 41 nt, synthetic construct
  source 1..41: mol_type = other RNA
ttgtcacaccagaaaatgaagttgacaaagtggtcgttgag

SEQ ID NO: 4318 - RNA, 41 nt, synthetic construct
  source 1..41: mol_type = other RNA
tcgtcacaccaggaaatgagattgacaaagtggtcgttgag

SEQ ID NO: 4319 - RNA, 45 nt, synthetic construct
  source 1..45: mol_type = other RNA
caccaccctgttgctgtagcattcggctttttatgtcattccagg

SEQ ID NO: 4320 - RNA, 41 nt, synthetic construct
  source 1..41: mol_type = other RNA
ctgacacaccaggaaatgggcttgacaaagtggtcgttgag

SEQ ID NO: 4321 - RNA, 41 nt, synthetic construct
  source 1..41: mol_type = other RNA
ctgtcacaccgggaaatgagattgacaaagtggtcgttgag

SEQ ID NO: 4322 - RNA, 41 nt, synthetic construct
  source 1..41: mol_type = other RNA
tcgtcacaccaggaactgagtttgacaaagtggtcgttgag

SEQ ID NO: 4323 - RNA, 41 nt, synthetic construct
  source 1..41: mol_type = other RNA
ttgtcacttcagggaatgagcttgacaaagtggtcgttgag

SEQ ID NO: 4324 - RNA, 41 nt, synthetic construct
  source 1..41: mol_type = other RNA
tttacacaccaggaaatgagtttgacaaagtggtcgttgag

SEQ ID NO: 4325 - RNA, 41 nt, synthetic construct
  source 1..41: mol_type = other RNA
caccaccctgttgctgtagccaaattggttgtaacccaagg

SEQ ID NO: 4326 - RNA, 51 nt, synthetic construct
  source 1..51: mol_type = other RNA
caccaccctgttgctgtagccaaattgcttgtcacaaaaaaaaaaaccagg

SEQ ID NO: 4327 - RNA, 41 nt, synthetic construct
  source 1..41: mol_type = other RNA
caccaccctgttgctgtagccaaattcgcgtgttcaccagg

SEQ ID NO: 4328 - RNA, 41 nt, synthetic construct
  source 1..41: mol_type = other RNA
caccaccctgttgctgtagccaacgtcgttgtcacgccagg

SEQ ID NO: 4329 - RNA, 41 nt, synthetic construct
  source 1..41: mol_type = other RNA
tgtagccaaattcgcgatcactccaggaaatgagcttgaca

SEQ ID NO: 4330 - RNA, 41 nt, synthetic construct
  source 1..41: mol_type = other RNA
tggtcacaccacgaaatgagtttgacaaagtggtcgttgag

SEQ ID NO: 4331 - RNA, 41 nt, synthetic construct
  source 1..41: mol_type = other RNA
caccaccctgttgctgtagccaaattcgtcgtccccaacgg

SEQ ID NO: 4332 - RNA, 55 nt, synthetic construct
  source 1..55: mol_type = other RNA
caccaccctgttgctgtagccaagttcgttgtctggctgttcattaccgggcagg

SEQ ID NO: 4333 - RNA, 41 nt, synthetic construct
  source 1..41: mol_type = other RNA
tgtagccaaattcggtgtcgtaccaggagatgagcttgaca

SEQ ID NO: 4334 - RNA, 41 nt, synthetic construct
  source 1..41: mol_type = other RNA
caccaccctgttgctgtagccatattcgatgttatgctaga

SEQ ID NO: 4335 - RNA, 37 nt, synthetic construct
  source 1..37: mol_type = other RNA
aataccaggaaatgagcttgacaaagtggtcgttgag

SEQ ID NO: 4336 - RNA, 41 nt, synthetic construct
  source 1..41: mol_type = other RNA
caccaccctgttgctgtagccaatttcgttgtcacgccagg

SEQ ID NO: 4337 - RNA, 41 nt, synthetic construct
  source 1..41: mol_type = other RNA
ttgtcatacccggaaatgagcttgacaaagtggtcgttgag

SEQ ID NO: 4338 - RNA, 41 nt, synthetic construct
  source 1..41: mol_type = other RNA
tcgtcacaccaggaaataagtttgacaaagtggtcgttgag

SEQ ID NO: 4339 - RNA, 41 nt, synthetic construct
  source 1..41: mol_type = other RNA
caccaccctgttgctgtagccaaatttgttgtcgcgcaagg

SEQ ID NO: 4340 - RNA, 48 nt, synthetic construct
  source 1..48: mol_type = other RNA
ttgtcacaacaggaaataacttttgaggttgacaaagtggtcgttgag

SEQ ID NO: 4341 - RNA, 48 nt, synthetic construct
  source 1..48: mol_type = other RNA
caccaccctgttgctgtagcctcaaattcgttaaatcacacccaaagg

SEQ ID NO: 4342 - RNA, 37 nt, synthetic construct
  source 1..37: mol_type = other RNA
caccaccctgttgctgtagccaaattctaataccagg

SEQ ID NO: 4343 - RNA, 41 nt, synthetic construct
  source 1..41: mol_type = other RNA
ttgtaacaccaggaaatgaaattgacaaagtggtcgttgag

SEQ ID NO: 4344 - RNA, 42 nt, synthetic construct
  source 1..42: mol_type = other RNA
ttgtcacacaagtaaatgaagcttgacaaagtggtcgttgag

SEQ ID NO: 4345 - RNA, 41 nt, synthetic construct
  source 1..41: mol_type = other RNA
caccaccctgttgctgtagccaaagtcgttgtcattctagg

SEQ ID NO: 4346 - RNA, 41 nt, synthetic construct
  source 1..41: mol_type = other RNA
caccaccctgttgctgtagccaaattcgttgaatcatcagg

SEQ ID NO: 4347 - RNA, 41 nt, synthetic construct
  source 1..41: mol_type = other RNA
gtgtcataccaggaagtgagcttgacaaagtggtcgttgag

SEQ ID NO: 4348 - RNA, 41 nt, synthetic construct
  source 1..41: mol_type = other RNA
tgtagccaaattcgtatggacaccaaaaaatgagcttgaca

SEQ ID NO: 4349 - RNA, 48 nt, synthetic construct
  source 1..48: mol_type = other RNA
caccaccctgttgctgtagccaaattcgttgacactaaaaataccagg

SEQ ID NO: 4350 - RNA, 41 nt, synthetic construct
  source 1..41: mol_type = other RNA
ttgtcacaaaaggaaatgaacttgacaaagtggtcgttgag

SEQ ID NO: 4351 - RNA, 43 nt, synthetic construct
  source 1..43: mol_type = other RNA
ttgtcacaaccaggaaatgaggcttgacaaagtggtcgttgag

SEQ ID NO: 4352 - RNA, 46 nt, synthetic construct
  source 1..46: mol_type = other RNA
caccaccctgttgctgtagccaaattcgttgtgaaacacaaccagg

SEQ ID NO: 4353 - RNA, 41 nt, synthetic construct
  source 1..41: mol_type = other RNA
ttgtcataccaggaaatgagattgacaaagtggtcgttgag

SEQ ID NO: 4354 - RNA, 41 nt, synthetic construct
  source 1..41: mol_type = other RNA
ttgtcagactagaaaatgggcttgacaaagtggtcgttgag

SEQ ID NO: 4355 - RNA, 48 nt, synthetic construct
  source 1..48: mol_type = other RNA
caccaccctgttgctgtagccaaattcgttgacactaaaaacaccagg

SEQ ID NO: 4356 - RNA, 41 nt, synthetic construct
  source 1..41: mol_type = other RNA
ttgtcactccgggaagtgcgcttgacaaagtggtcgttgag

SEQ ID NO: 4357 - RNA, 41 nt, synthetic construct
  source 1..41: mol_type = other RNA
tcgtcacaccggggaaagagcttgacaaagtggtcgttgag

SEQ ID NO: 4358 - RNA, 42 nt, synthetic construct
  source 1..42: mol_type = other RNA
tgtagccaaattcgtatggaccaccaaaaaatgagcttgaca

SEQ ID NO: 4359 - RNA, 41 nt, synthetic construct
  source 1..41: mol_type = other RNA
ttgtcacaacaggaaataagtttgacaaagtggtcgttgag

SEQ ID NO: 4360 - RNA, 40 nt, synthetic construct
  source 1..40: mol_type = other RNA
tagtcacccagggaatgagcttgacaaagtggtcgttgag

SEQ ID NO: 4361 - RNA, 41 nt, synthetic construct
  source 1..41: mol_type = other RNA
ttgtcacacccggaaatgggattgacaaagtggtcgttgag

SEQ ID NO: 4362 - RNA, 41 nt, synthetic construct
  source 1..41: mol_type = other RNA
tgtagccaaattcgttatcatcacagcaaatgagcttgaca

SEQ ID NO: 4363 - RNA, 42 nt, synthetic construct
  source 1..42: mol_type = other RNA
ttgtcacaaccaggaaatgcgcttgacaaagtggtcgttgag

SEQ ID NO: 4364 - RNA, 40 nt, synthetic construct
  source 1..40: mol_type = other RNA
caccaccctgttgctgtagccaaattggttgtcacccagg

SEQ ID NO: 4365 - RNA, 52 nt, synthetic construct
  source 1..52: mol_type = other RNA
caccaccctgttgctgtagcatcaaattcgttaaaaaaaaaaatcgtacagg

SEQ ID NO: 4366 - RNA, 41 nt, synthetic construct
  source 1..41: mol_type = other RNA
caccaccctgttgctgtagccaaattggatgtcacggtgga

SEQ ID NO: 4367 - RNA, 55 nt, synthetic construct
  source 1..55: mol_type = other RNA
caccaccctgttgctgtagccaagttcgttgtctggctgttcattaccgcgcagg

SEQ ID NO: 4368 - RNA, 41 nt, synthetic construct
  source 1..41: mol_type = other RNA
ttgtcgcaccaggtaacgagcttgacaaagtggtcgttgag

SEQ ID NO: 4369 - RNA, 41 nt, synthetic construct
  source 1..41: mol_type = other RNA
gtgtcgtaccaggagatgagcttgacaaagtggtcgttgag

SEQ ID NO: 4370 - RNA, 40 nt, synthetic construct
  source 1..40: mol_type = other RNA
ttgtcacccagggaatgagcttgacaaagtggtcgttgag

SEQ ID NO: 4371 - RNA, 41 nt, synthetic construct
  source 1..41: mol_type = other RNA
ttgtcacacccagaaatgagattgacaaagtggtcgttgag

SEQ ID NO: 4372 - RNA, 41 nt, synthetic construct
  source 1..41: mol_type = other RNA
tttacacacccggaaatgagcttgacaaagtggtcgttgag

SEQ ID NO: 4373 - RNA, 41 nt, synthetic construct
  source 1..41: mol_type = other RNA
ttgtcacacagggaaatgagattgacaaagtggtcgttgag

SEQ ID NO: 4374 - RNA, 41 nt, synthetic construct
  source 1..41: mol_type = other RNA
ttgtcgtaccaggaagagagcttgacaaagtggtcgttgag

SEQ ID NO: 4375 - RNA, 41 nt, synthetic construct
  source 1..41: mol_type = other RNA
tcgtcacgccaggaaatgagtttgacaaagtggtcgttgag

SEQ ID NO: 4376 - RNA, 41 nt, synthetic construct
  source 1..41: mol_type = other RNA
tgtagccaaagtcgttgtcactctaggatgtgagcttgaca

SEQ ID NO: 4377 - RNA, 42 nt, synthetic construct
  source 1..42: mol_type = other RNA
ttgtctcaccaggaaatgcgatttgacaaagtggtcgttgag

SEQ ID NO: 4378 - RNA, 41 nt, synthetic construct
  source 1..41: mol_type = other RNA
tcgtcacacaaggagatgagcttgacaaagtggtcgttgag

SEQ ID NO: 4379 - RNA, 41 nt, synthetic construct
  source 1..41: mol_type = other RNA
tagtcacaccaaaaaatgagcttgacaaagtggtcgttgag

SEQ ID NO: 4380 - RNA, 41 nt, synthetic construct
  source 1..41: mol_type = other RNA
ttgacccactaggaaatgagcttgacaaagtggtcgttgag

SEQ ID NO: 4381 - RNA, 41 nt, synthetic construct
  source 1..41: mol_type = other RNA
ttgtcatgccaggaaatgagcttgacaaagtggtcgttgag

SEQ ID NO: 4382 - RNA, 38 nt, synthetic construct
  source 1..38: mol_type = other RNA
caccaccctgttgctgtagccaaattctaatcaccagg

SEQ ID NO: 4383 - RNA, 42 nt, synthetic construct
  source 1..42: mol_type = other RNA
ttctcacaccaatacattgagcttgacaaagtggtcgttgag

SEQ ID NO: 4384 - RNA, 42 nt, synthetic construct
  source 1..42: mol_type = other RNA
ctgtcacaaccaggaaatgggcttgacaaagtggtcgttgag

SEQ ID NO: 4385 - RNA, 37 nt, synthetic construct
  source 1..37: mol_type = other RNA
caccaccctgttgctgtagccaaattcgttgtcgcgg

SEQ ID NO: 4386 - RNA, 41 nt, synthetic construct
  source 1..41: mol_type = other RNA
ttctcacactaggacatgcaattgacaaagtggtcgttgag

SEQ ID NO: 4387 - RNA, 41 nt, synthetic construct
  source 1..41: mol_type = other RNA
ttctcacaccatgaaacccgcttgacaaagtggtcgttgag

SEQ ID NO: 4388 - RNA, 41 nt, synthetic construct
  source 1..41: mol_type = other RNA
caccaccctgttgctgtagccaaatttgttgtcgtgcaagg

SEQ ID NO: 4389 - RNA, 41 nt, synthetic construct
  source 1..41: mol_type = other RNA
tcgtccccaacggaaatgagcttgacaaagtggtcgttgag

SEQ ID NO: 4390 - RNA, 41 nt, synthetic construct
  source 1..41: mol_type = other RNA
ttgtttcaccagacaatgagcttgacaaagtggtcgttgag

SEQ ID NO: 4391 - RNA, 50 nt, synthetic construct
  source 1..50: mol_type = other RNA
caccaccctgttgctgtagccatattggtttcatttgctgcccagccagg

SEQ ID NO: 4392 - RNA, 41 nt, synthetic construct
  source 1..41: mol_type = other RNA
tcgtcctcaacggaaatgagcttgacaaagtggtcgttgag

SEQ ID NO: 4393 - RNA, 44 nt, synthetic construct
  source 1..44: mol_type = other RNA
ttagtcacaccagaacgaaatagcttgacaaagtggtcgttgag

SEQ ID NO: 4394 - RNA, 41 nt, synthetic construct
  source 1..41: mol_type = other RNA
ttgaatcatcaggaactgagcttgacaaagtggtcgttgag

SEQ ID NO: 4395 - RNA, 40 nt, synthetic construct
  source 1..40: mol_type = other RNA
caccaccctgttgctgtagccaatttggtagtcacccagg

SEQ ID NO: 4396 - RNA, 41 nt, synthetic construct
  source 1..41: mol_type = other RNA
ttatcaccacagcaaatgagcttgacaaagtggtcgttgag

SEQ ID NO: 4397 - RNA, 57 nt, synthetic construct
  source 1..57: mol_type = other RNA
caccaccctgttgctgtagccacattcgatcttgtgtcattccaacttccgcccagg

SEQ ID NO: 4398 - RNA, 41 nt, synthetic construct
  source 1..41: mol_type = other RNA
ttgtcacgccaggaaatgggcttgacaaagtggtcgttgag

SEQ ID NO: 4399 - RNA, 41 nt, synthetic construct
  source 1..41: mol_type = other RNA
tgtagccaaaatcgttgtcacatcaggaaatgagcttgaca

SEQ ID NO: 4400 - RNA, 40 nt, synthetic construct
  source 1..40: mol_type = other RNA
caccaccctgttgctgtagccaaattcgttgtcttgcaca

SEQ ID NO: 4401 - RNA, 41 nt, synthetic construct
  source 1..41: mol_type = other RNA
cgatcactccaggaaatgagcttgacaaagtggtcgttgag

SEQ ID NO: 4402 - RNA, 40 nt, synthetic construct
  source 1..40: mol_type = other RNA
tgtagccaaagtcgttgtcacatcggaaaagagcttgaca

SEQ ID NO: 4403 - RNA, 41 nt, synthetic construct
  source 1..41: mol_type = other RNA
tgtagccaaatagttgtcacaaccaggaaatgagcttgaca

SEQ ID NO: 4404 - RNA, 41 nt, synthetic construct
  source 1..41: mol_type = other RNA
tgtagccaaagtcgttgtcattctaggatgtgagcttgaca

SEQ ID NO: 4405 - RNA, 41 nt, synthetic construct
  source 1..41: mol_type = other RNA
tgtagccaaattcgttgtcagactagtaaatgagcttgaca

SEQ ID NO: 4406 - RNA, 41 nt, synthetic construct
  source 1..41: mol_type = other RNA
tgtagccaaattcgttgtcatcacaggaagtgagcttgaca

SEQ ID NO: 4407 - RNA, 41 nt, synthetic construct
  source 1..41: mol_type = other RNA
tgtagccaaattcgttgtcacgccaggaaatgagcttgaca

SEQ ID NO: 4408 - RNA, 48 nt, synthetic construct
  source 1..48: mol_type = other RNA
tgtagccaaattcggctttttatgtcactccaggaaacgagcttgaca

SEQ ID NO: 4409 - RNA, 40 nt, synthetic construct
  source 1..40: mol_type = other RNA
tgtagccaaagtcgttgtcatatcggaaaagagcttgaca

SEQ ID NO: 4410 - RNA, 39 nt, synthetic construct
  source 1..39: mol_type = other RNA
caccaccctgttgctgtagccaaattcgttgagccaagg

SEQ ID NO: 4411 - RNA, 41 nt, synthetic construct
  source 1..41: mol_type = other RNA
ttgtcatcacaggaagtgagcttgacaaagtggtcgttgag

SEQ ID NO: 4412 - RNA, 41 nt, synthetic construct
  source 1..41: mol_type = other RNA
ttgttttaccagacaatgagcttgacaaagtggtcgttgag

SEQ ID NO: 4413 - RNA, 41 nt, synthetic construct
  source 1..41: mol_type = other RNA
ttgtcacacacagaaatgagtttgacaaagtggtcgttgag

SEQ ID NO: 4414 - RNA, 40 nt, synthetic construct
  source 1..40: mol_type = other RNA
ttgtcatatcggaaaagagcttgacaaagtggtcgttgag

SEQ ID NO: 4415 - RNA, 44 nt, synthetic construct
  source 1..44: mol_type = other RNA
caccaccctgttgctgtagccaaattcgttaaaatcaaacctgg

SEQ ID NO: 4416 - RNA, 41 nt, synthetic construct
  source 1..41: mol_type = other RNA
tgtagccaaattcgttatcacgctaggaaatgagcttgaca

SEQ ID NO: 4417 - RNA, 39 nt, synthetic construct
  source 1..39: mol_type = other RNA
tgtagccaaattcgttgtcttgcacaaatgagcttgaca

SEQ ID NO: 4418 - RNA, 37 nt, synthetic construct
  source 1..37: mol_type = other RNA
tgtagccaaattctaataccaggaaatgagcttgaca

SEQ ID NO: 4419 - RNA, 41 nt, synthetic construct
  source 1..41: mol_type = other RNA
ttgtctcaccaggcaatggacttgacaaagtggtcgttgag

SEQ ID NO: 4420 - RNA, 41 nt, synthetic construct
  source 1..41: mol_type = other RNA
ttatcacaccaagaaacgcacttgacaaagtggtcgttgag

SEQ ID NO: 4421 - RNA, 39 nt, synthetic construct
  source 1..39: mol_type = other RNA
tgtagccaaattcgttgtctcgcacaaatgagcttgaca

SEQ ID NO: 4422 - RNA, 41 nt, synthetic construct
  source 1..41: mol_type = other RNA
ttgtcacacccaactatgagattgacaaagtggtcgttgag

SEQ ID NO: 4423 - RNA, 45 nt, synthetic construct
  source 1..45: mol_type = other RNA
ttgtgaaacacaaccaggaaatgggttgacaaagtggtcgttgag

SEQ ID NO: 4424 - RNA, 41 nt, synthetic construct
  source 1..41: mol_type = other RNA
tgtagccaaattcgatgttacgctagaaaatgagcttgaca

SEQ ID NO: 4425 - RNA, 52 nt, synthetic construct
  source 1..52: mol_type = other RNA
caccaccctgttgctgtagcatcaaattcgttaaaaaaaaaaatcgcacagg

SEQ ID NO: 4426 - RNA, 41 nt, synthetic construct
  source 1..41: mol_type = other RNA
tgtagccaaattcgttgtcatcaacggaaaggagcttgaca

SEQ ID NO: 4427 - RNA, 39 nt, synthetic construct
  source 1..39: mol_type = other RNA
tgttcaccaggaaatgcgcttgacaaagtggtcgttgag

SEQ ID NO: 4428 - RNA, 41 nt, synthetic construct
  source 1..41: mol_type = other RNA
caccaccctgttgctgtagccatattcgatgttacgctaga

SEQ ID NO: 4429 - RNA, 41 nt, synthetic construct
  source 1..41: mol_type = other RNA
tgtagccaaattcgttgaattatcaggaactgagcttgaca

SEQ ID NO: 4430 - RNA, 40 nt, synthetic construct
  source 1..40: mol_type = other RNA
ttgtcacatcggaaaagagcttgacaaagtggtcgttgag

SEQ ID NO: 4431 - RNA, 49 nt, synthetic construct
  source 1..49: mol_type = other RNA
tgtagccaaattcgttaaatcaaacccaaaggaacaaatgagcttgaca

SEQ ID NO: 4432 - RNA, 41 nt, synthetic construct
  source 1..41: mol_type = other RNA
ttctcacaccaagaaacccgcttgacaaagtggtcgttgag

SEQ ID NO: 4433 - RNA, 48 nt, synthetic construct
  source 1..48: mol_type = other RNA
tgtagccaaattcgttgtcactcccagacaaaggaaatgagcttgaca

SEQ ID NO: 4434 - RNA, 41 nt, synthetic construct
  source 1..41: mol_type = other RNA
ttgtcattccgggaagtgcgcttgacaaagtggtcgttgag

SEQ ID NO: 4435 - RNA, 42 nt, synthetic construct
  source 1..42: mol_type = other RNA
ttgtcacacaagaaaatgaagcttgacaaagtggtcgttgag

SEQ ID NO: 4436 - RNA, 41 nt, synthetic construct
  source 1..41: mol_type = other RNA
ttgtcacgccaggaaatgcgcttgacaaagtggtcgttgag

SEQ ID NO: 4437 - RNA, 41 nt, synthetic construct
  source 1..41: mol_type = other RNA
ttttcacattaggaattgagcttgacaaagtggtcgttgag

SEQ ID NO: 4438 - RNA, 38 nt, synthetic construct
  source 1..38: mol_type = other RNA
tgtagccaaattctaatcaccaggaaatgagcttgaca

SEQ ID NO: 4439 - RNA, 41 nt, synthetic construct
  source 1..41: mol_type = other RNA
ttgaattatcaggaactgagcttgacaaagtggtcgttgag

SEQ ID NO: 4440 - RNA, 41 nt, synthetic construct
  source 1..41: mol_type = other RNA
ttgtcacacaacggagtacgcttgacaaagtggtcgttgag

SEQ ID NO: 4441 - RNA, 40 nt, synthetic construct
  source 1..40: mol_type = other RNA
tgttccaccaggaaatgcgcttgacaaagtggtcgttgag

SEQ ID NO: 4442 - RNA, 41 nt, synthetic construct
  source 1..41: mol_type = other RNA
ttgtaacaccaagaaatgagtttgacaaagtggtcgttgag

SEQ ID NO: 4443 - RNA, 41 nt, synthetic construct
  source 1..41: mol_type = other RNA
ttgtcattctaggatgtgagcttgacaaagtggtcgttgag

SEQ ID NO: 4444 - RNA, 40 nt, synthetic construct
  source 1..40: mol_type = other RNA
caccaccctgttgctgtagccacgtcgtcgtcacgccagg

SEQ ID NO: 4445 - RNA, 40 nt, synthetic construct
  source 1..40: mol_type = other RNA
ttgtaacgccgggaatgagcttgacaaagtggtcgttgag

SEQ ID NO: 4446 - RNA, 41 nt, synthetic construct
  source 1..41: mol_type = other RNA
ttgtcataccacgaaatgagtttgacaaagtggtcgttgag

SEQ ID NO: 4447 - RNA, 39 nt, synthetic construct
  source 1..39: mol_type = other RNA
ttgagcaaaggaaatgggcttgacaaagtggtcgttgag

SEQ ID NO: 4448 - RNA, 41 nt, synthetic construct
  source 1..41: mol_type = other RNA
tgtagccaaattcgttgtcaccaacggaaaggagcttgaca

SEQ ID NO: 4449 - RNA, 42 nt, synthetic construct
  source 1..42: mol_type = other RNA
tcgtcacaccaggaaaatgaagttgacaaagtggtcgttgag

SEQ ID NO: 4450 - RNA, 42 nt, synthetic construct
  source 1..42: mol_type = other RNA
tgtagccaaattatgttgtcgtaccaggtaacgagcttgaca

SEQ ID NO: 4451 - RNA, 37 nt, synthetic construct
  source 1..37: mol_type = other RNA
caccaccctgttgctgtagccaagtatgttgtccaga

SEQ ID NO: 4452 - RNA, 41 nt, synthetic construct
  source 1..41: mol_type = other RNA
ctgtcacacgttaggatgagcttgacaaagtggtcgttgag

SEQ ID NO: 4453 - RNA, 46 nt, synthetic construct
  source 1..46: mol_type = other RNA
tgtagccaaattcgttgtgaaacacaaccaggaaatgagcttgaca

SEQ ID NO: 4454 - RNA, 41 nt, synthetic construct
  source 1..41: mol_type = other RNA
ttgtcgtaccaggtaacgagcttgacaaagtggtcgttgag

SEQ ID NO: 4455 - RNA, 35 nt, synthetic construct
  source 1..35: mol_type = other RNA
ttgtcgggaaatagcttgacaaagtggtcgttgag

SEQ ID NO: 4456 - RNA, 49 nt, synthetic construct
  source 1..49: mol_type = other RNA
ttaaaatcacacctggagcaagaatgagcttgacaaagtggtcgttgag

SEQ ID NO: 4457 - RNA, 41 nt, synthetic construct
  source 1..41: mol_type = other RNA
tgtagccaaattcgttgtcaccacaggaagtgagcttgaca

SEQ ID NO: 4458 - RNA, 41 nt, synthetic construct
  source 1..41: mol_type = other RNA
ctgctacaccaggaaatgggattgacaaagtggtcgttgag

SEQ ID NO: 4459 - RNA, 52 nt, synthetic construct
  source 1..52: mol_type = other RNA
ttaaaaaaaaaaatcgcacagggaaatttagcttgacaaagtggtcgttgag

SEQ ID NO: 4460 - RNA, 47 nt, synthetic construct
  source 1..47: mol_type = other RNA
ttgtctcgcacaaatgtttatattggcttgacaaagtggtcgttgag

SEQ ID NO: 4461 - RNA, 41 nt, synthetic construct
  source 1..41: mol_type = other RNA
caccaccctgttgctgtagccacattcgttatcatcacagc

SEQ ID NO: 4462 - RNA, 41 nt, synthetic construct
  source 1..41: mol_type = other RNA
ttgtcgcaccaggaaaccagtttgacaaagtggtcgttgag

SEQ ID NO: 4463 - RNA, 46 nt, synthetic construct
  source 1..46: mol_type = other RNA
tgtagccaaattcgttgtgaaatacaaccaggaaatgagcttgaca

SEQ ID NO: 4464 - RNA, 42 nt, synthetic construct
  source 1..42: mol_type = other RNA
ttctcacaccaaaacattgagcttgacaaagtggtcgttgag

SEQ ID NO: 4465 - RNA, 40 nt, synthetic construct
  source 1..40: mol_type = other RNA
ttgtcacccaggaaaggtgcttgacaaagtggtcgttgag

SEQ ID NO: 4466 - RNA, 41 nt, synthetic construct
  source 1..41: mol_type = other RNA
ttgtaacccaaggaatggagcttgacaaagtggtcgttgag

SEQ ID NO: 4467 - RNA, 41 nt, synthetic construct
  source 1..41: mol_type = other RNA
ttatcacacagagaaatgagattgacaaagtggtcgttgag

SEQ ID NO: 4468 - RNA, 39 nt, synthetic construct
  source 1..39: mol_type = other RNA
ttgagccaaggaaatgggcttgacaaagtggtcgttgag

SEQ ID NO: 4469 - RNA, 42 nt, synthetic construct
  source 1..42: mol_type = other RNA
ttatcacaccgcgaaagtgacgttgacaaagtggtcgttgag

SEQ ID NO: 4470 - RNA, 41 nt, synthetic construct
  source 1..41: mol_type = other RNA
ttgtaacacccagaaatgagtttgacaaagtggtcgttgag

SEQ ID NO: 4471 - RNA, 41 nt, synthetic construct
  source 1..41: mol_type = other RNA
ttgtcatcaacggaaagtagcttgacaaagtggtcgttgag

SEQ ID NO: 4472 - RNA, 45 nt, synthetic construct
  source 1..45: mol_type = other RNA
caccaccctgttgctgtagcattcggctttttatgtcactccagg

SEQ ID NO: 4473 - RNA, 41 nt, synthetic construct
  source 1..41: mol_type = other RNA
ttgtcttaccaggcaatggacttgacaaagtggtcgttgag

SEQ ID NO: 4474 - RNA, 39 nt, synthetic construct
  source 1..39: mol_type = other RNA
tgtagccaaattcgttgagccaaggaaatgagcttgaca

SEQ ID NO: 4475 - RNA, 50 nt, synthetic construct
  source 1..50: mol_type = other RNA
ttgttacaaaggaaatgactgtgccagggcttgacaaagtggtcgttgag

SEQ ID NO: 4476 - RNA, 41 nt, synthetic construct
  source 1..41: mol_type = other RNA
ttatcacagcctgaagtgagcttgacaaagtggtcgttgag

SEQ ID NO: 4477 - RNA, 41 nt, synthetic construct
  source 1..41: mol_type = other RNA
ttgtcaccacaggaagtgagcttgacaaagtggtcgttgag

SEQ ID NO: 4478 - RNA, 49 nt, synthetic construct
  source 1..49: mol_type = other RNA
tgtagccaaattcgttaaaatcaaacctggagcaagaatgagcttgaca

SEQ ID NO: 4479 - RNA, 41 nt, synthetic construct
  source 1..41: mol_type = other RNA
ttgtcactctaggatgtgagcttgacaaagtggtcgttgag

SEQ ID NO: 4480 - RNA, 40 nt, synthetic construct
  source 1..40: mol_type = other RNA
ttgtccagaaataaatgagtttgacaaagtggtcgttgag

SEQ ID NO: 4481 - RNA, 41 nt, synthetic construct
  source 1..41: mol_type = other RNA
ttaccacaccagatcatgaacttgacaaagtggtcgttgag

SEQ ID NO: 4482 - RNA, 41 nt, synthetic construct
  source 1..41: mol_type = other RNA
ttgtcaccaacggaaagtagcttgacaaagtggtcgttgag

SEQ ID NO: 4483 - RNA, 39 nt, synthetic construct
  source 1..39: mol_type = other RNA
caccaccctgttgctgtagccaaatagttgtcacccagg

SEQ ID NO: 4484 - RNA, 48 nt, synthetic construct
  source 1..48: mol_type = other RNA
ttgtcactcccagacaaaggaaatgagattgacaaagtggtcgttgag

SEQ ID NO: 4485 - RNA, 48 nt, synthetic construct
  source 1..48: mol_type = other RNA
tgtagccaaattcggctttttatgtcattccaggaaacgagcttgaca

SEQ ID NO: 4486 - RNA, 59 nt, synthetic construct
  source 1..59: mol_type = other RNA
ttgtgaaaaaaccagctaataattgaatgacaacagagcttgacaaagtggtcgttgag

SEQ ID NO: 4487 - RNA, 48 nt, synthetic construct
  source 1..48: mol_type = other RNA
gctttttatgtcactccaggaaactcgcttgacaaagtggtcgttgag

SEQ ID NO: 4488 - RNA, 59 nt, synthetic construct
  source 1..59: mol_type = other RNA
ttgtgacaaaaccagctaataattgaatgacaacagagcttgacaaagtggtcgttgag

SEQ ID NO: 4489 - RNA, 40 nt, synthetic construct
  source 1..40: mol_type = other RNA
atgtcacggtggaaaatggcttgacaaagtggtcgttgag

SEQ ID NO: 4490 - RNA, 41 nt, synthetic construct
  source 1..41: mol_type = other RNA
tgtagccaaatttgttgtcgtgcaaggccatgagcttgaca

SEQ ID NO: 4491 - RNA, 41 nt, synthetic construct
  source 1..41: mol_type = other RNA
ttgtcgcaccaaaaaatgaaattgacaaagtggtcgttgag

SEQ ID NO: 4492 - RNA, 37 nt, synthetic construct
  source 1..37: mol_type = other RNA
tgtagccaaattcgttgtcgcggaaatgagcttgaca

SEQ ID NO: 4493 - RNA, 52 nt, synthetic construct
  source 1..52: mol_type = other RNA
ttaaaaaaaaaaatcgtacagggaaatttagcttgacaaagtggtcgttgag

SEQ ID NO: 4494 - RNA, 50 nt, synthetic construct
  source 1..50: mol_type = other RNA
tgtagccaaattcgttaaaaaaaaaaatcgtacagggaaagagcttgaca

SEQ ID NO: 4495 - RNA, 58 nt, synthetic construct
  source 1..58: mol_type = other RNA
ttgatgattgtataaaattcatgtcatggggaatgtgcttgacaaagtggtcgttgag

SEQ ID NO: 4496 - RNA, 41 nt, synthetic construct
  source 1..41: mol_type = other RNA
tgtagccaaattcgttgaatcatcaggaactgagcttgaca

SEQ ID NO: 4497 - RNA, 47 nt, synthetic construct
  source 1..47: mol_type = other RNA
ttgtcttgcacaaatgtttatattggcttgacaaagtggtcgttgag

SEQ ID NO: 4498 - RNA, 41 nt, synthetic construct
  source 1..41: mol_type = other RNA
ttatcacacagtgaaatgagattgacaaagtggtcgttgag

SEQ ID NO: 4499 - RNA, 45 nt, synthetic construct
  source 1..45: mol_type = other RNA
ttgtgaaatacaaccaggaaatgggttgacaaagtggtcgttgag

SEQ ID NO: 4500 - RNA, 36 nt, synthetic construct
  source 1..36: mol_type = other RNA
tgtagccaaattcgttgtcgggaaatgagcttgaca

SEQ ID NO: 4501 - RNA, 41 nt, synthetic construct
  source 1..41: mol_type = other RNA
ttatcacgctaggaaatgagattgacaaagtggtcgttgag

SEQ ID NO: 4502 - RNA, 41 nt, synthetic construct
  source 1..41: mol_type = other RNA
tgtagccaaattcgatgttatgctagaaaatgagcttgaca

SEQ ID NO: 4503 - RNA, 55 nt, synthetic construct
  source 1..55: mol_type = other RNA
tgtagccaaattcgttgacactaaaaatatcaggaaatagccagtgagcttgaca

SEQ ID NO: 4504 - RNA, 49 nt, synthetic construct
  source 1..49: mol_type = other RNA
ttaaaatcaaacctggagcaagaatgagcttgacaaagtggtcgttgag

SEQ ID NO: 4505 - RNA, 36 nt, synthetic construct
  source 1..36: mol_type = other RNA
ttgtcgcggaaatagcttgacaaagtggtcgttgag

SEQ ID NO: 4506 - RNA, 41 nt, synthetic construct
  source 1..41: mol_type = other RNA
tgtagccaaattcgtcgtccccaacggaaatgagcttgaca

SEQ ID NO: 4507 - RNA, 40 nt, synthetic construct
  source 1..40: mol_type = other RNA
atgtcatggtggaaaatggcttgacaaagtggtcgttgag

SEQ ID NO: 4508 - RNA, 52 nt, synthetic construct
  source 1..52: mol_type = other RNA
ttgtcacaaaaaaaaaaaccaggaaatgcagcttgacaaagtggtcgttgag

SEQ ID NO: 4509 - RNA, 41 nt, synthetic construct
  source 1..41: mol_type = other RNA
tgtagccaaagtcgttgtcacgccaggaaatgagcttgaca

SEQ ID NO: 4510 - RNA, 40 nt, synthetic construct
  source 1..40: mol_type = other RNA
tgtagccaaatcgtcgtcacgccaggaaatgagcttgaca

SEQ ID NO: 4511 - RNA, 50 nt, synthetic construct
  source 1..50: mol_type = other RNA
tgtagccaaattcgttaaaaaaaaaaatcgcacagggaaagagcttgaca

SEQ ID NO: 4512 - RNA, 41 nt, synthetic construct
  source 1..41: mol_type = other RNA
tgtagccaaatttgttgtcgcgcaaggccatgagcttgaca

SEQ ID NO: 4513 - RNA, 41 nt, synthetic construct
  source 1..41: mol_type = other RNA
ctgttacacaaggaaataagattgacaaagtggtcgttgag

SEQ ID NO: 4514 - RNA, 40 nt, synthetic construct
  source 1..40: mol_type = other RNA
atgttatgctagaaaatcggttgacaaagtggtcgttgag

SEQ ID NO: 4515 - RNA, 40 nt, synthetic construct
  source 1..40: mol_type = other RNA
atgttacgctagaaaatcggttgacaaagtggtcgttgag

SEQ ID NO: 4516 - RNA, 41 nt, synthetic construct
  source 1..41: mol_type = other RNA
ttgtcacatcaggaaatgggattgacaaagtggtcgttgag

SEQ ID NO: 4517 - RNA, 41 nt, synthetic construct
  source 1..41: mol_type = other RNA
tgtagccaaattcgtcgtcctcaacggaaatgagcttgaca

SEQ ID NO: 4518 - RNA, 49 nt, synthetic construct
  source 1..49: mol_type = other RNA
ttaaatcaaacccaaaggaacaaatgagtttgacaaagtggtcgttgag

SEQ ID NO: 4519 - RNA, 40 nt, synthetic construct
  source 1..40: mol_type = other RNA
tgtagccaaattggtagtcacccagggaatgagcttgaca

SEQ ID NO: 4520 - RNA, 39 nt, synthetic construct
  source 1..39: mol_type = other RNA
tgtagccaaatatgttgtcagaaataaatgagcttgaca

SEQ ID NO: 4521 - RNA, 41 nt, synthetic construct
  source 1..41: mol_type = other RNA
tgtagccaaattggatgtcatggtggaaaatgagcttgaca

SEQ ID NO: 4522 - RNA, 58 nt, synthetic construct
  source 1..58: mol_type = other RNA
ttgatgattgtataaaattcacgtcatggggaatgtgcttgacaaagtggtcgttgag

SEQ ID NO: 4523 - RNA, 40 nt, synthetic construct
  source 1..40: mol_type = other RNA
tgtagccaaatgtgttgtaacgccgggaatgagcttgaca

SEQ ID NO: 4524 - RNA, 41 nt, synthetic construct
  source 1..41: mol_type = other RNA
tgtagccaaattggatgtcacggtggaaaatgagcttgaca

SEQ ID NO: 4525 - RNA, 48 nt, synthetic construct
  source 1..48: mol_type = other RNA
gctttttatgtcattccaggaaactcgcttgacaaagtggtcgttgag

SEQ ID NO: 4526 - RNA, 44 nt, synthetic construct
  source 1..44: mol_type = other RNA
tgtagccaaatgggttgtgacaaaaccagctaatgagcttgaca

SEQ ID NO: 4527 - RNA, 41 nt, synthetic construct
  source 1..41: mol_type = other RNA
tgtagccaaattggttgtaacccaaggaatggagcttgaca

SEQ ID NO: 4528 - RNA, 55 nt, synthetic construct
  source 1..55: mol_type = other RNA
tgtagccaaattcgttgacactaaaaacatcaggaaatagccagtgagcttgaca

SEQ ID NO: 4529 - RNA, 40 nt, synthetic construct
  source 1..40: mol_type = other RNA
tgtagccaaattggttgtcacccagggaatgagcttgaca

SEQ ID NO: 4530 - RNA, 40 nt, synthetic construct
  source 1..40: mol_type = other RNA
tgtagccaaatatgttgtccagaaataaatgagcttgaca

SEQ ID NO: 4531 - RNA, 39 nt, synthetic construct
  source 1..39: mol_type = other RNA
tgtagccaaatagttgtcacccaggaaaggagcttgaca

SEQ ID NO: 4532 - RNA, 39 nt, synthetic construct
  source 1..39: mol_type = other RNA
tgtagccaaattcgttgagcaaaggaaatgagcttgaca

SEQ ID NO: 4533 - RNA, 39 nt, synthetic construct
  source 1..39: mol_type = other RNA
ttgtcagaaataaatgagtttgacaaagtggtcgttgag

SEQ ID NO: 4534 - RNA, 39 nt, synthetic construct
  source 1..39: mol_type = other RNA
caccaccctgttgctgtagccaaattcgttgagcaaagg

SEQ ID NO: 4535 - RNA, 43 nt, synthetic construct
  source 1..43: mol_type = other RNA
ttttcgcactaggaaatgaccacttgacaaagtggtcgttgag

SEQ ID NO: 4536 - RNA, 44 nt, synthetic construct
  source 1..44: mol_type = other RNA
tgtagccaaatgggttgtgaaaaaaccagctaatgagcttgaca

SEQ ID NO: 4537 - RNA, 51 nt, synthetic construct
  source 1..51: mol_type = other RNA
tgtagccaaattgcttgtcacaaaaaaaaaaaccaggaaatgagcttgaca

SEQ ID NO: 4538 - RNA, 49 nt, synthetic construct
  source 1..49: mol_type = other RNA
ttaaatcacacccaaaggaacaaatgagtttgacaaagtggtcgttgag

SEQ ID NO: 4539 - RNA, 41 nt, synthetic construct
  source 1..41: mol_type = other RNA
tatggacaccaaaaaatgaaattgacaaagtggtcgttgag

SEQ ID NO: 4540 - RNA, 42 nt, synthetic construct
  source 1..42: mol_type = other RNA
tatggaccaccaaaaaatgaaattgacaaagtggtcgttgag

SEQ ID NO: 4541 - RNA, 41 nt, synthetic construct
  source 1..41: mol_type = other RNA
gtgctgcagccaaattcgttgtcataccaggaaatgagctt

SEQ ID NO: 4542 - RNA, 41 nt, synthetic construct
  source 1..41: mol_type = other RNA
ggtccaccacactgttgctgcaacaaatttcgttgtcatac

SEQ ID NO: 4543 - RNA, 41 nt, synthetic construct
  source 1..41: mol_type = other RNA
ggtccaccaccctgttgatgtagtcaaattcgttgtcatac

SEQ ID NO: 4544 - RNA, 42 nt, synthetic construct
  source 1..42: mol_type = other RNA
ggtccaccactctgttgctgcaacctaaattcgttgtcatac

SEQ ID NO: 4545 - RNA, 41 nt, synthetic construct
  source 1..41: mol_type = other RNA
ggtccaccaccttggtgctgcagccaaatcagttgtcatac

SEQ ID NO: 4546 - RNA, 41 nt, synthetic construct
  source 1..41: mol_type = other RNA
ggtccaccaccctggtgctgtagccgaattcgttgtcatac

SEQ ID NO: 4547 - RNA, 41 nt, synthetic construct
  source 1..41: mol_type = other RNA
ggtccaccaccctgttgatgcagccaagttggttgtcatac

SEQ ID NO: 4548 - RNA, 41 nt, synthetic construct
  source 1..41: mol_type = other RNA
ggtccaccaccctgtagttgcaaccacatccgttgtcatac

SEQ ID NO: 4549 - RNA, 41 nt, synthetic construct
  source 1..41: mol_type = other RNA
catgtgggccatgaggtccaccacacaattgctgcagccaa

SEQ ID NO: 4550 - RNA, 41 nt, synthetic construct
  source 1..41: mol_type = other RNA
ggtccaccaccctgttgatgcagtcaaattcgttgtcatac

SEQ ID NO: 4551 - RNA, 41 nt, synthetic construct
  source 1..41: mol_type = other RNA
ggtccaccaccctgtatctgtagccaaattcgttgtcatac

SEQ ID NO: 4552 - RNA, 41 nt, synthetic construct
  source 1..41: mol_type = other RNA
ggtccaccactctgatgctgcagacaaattcgttgtcatac

SEQ ID NO: 4553 - RNA, 41 nt, synthetic construct
  source 1..41: mol_type = other RNA
ggtccaccaccctgttggtgcagccgaaatcgttgtcatac

SEQ ID NO: 4554 - RNA, 41 nt, synthetic construct
  source 1..41: mol_type = other RNA
ggtccaccaccatgttgctgtagccaaattcgttgtcatac

SEQ ID NO: 4555 - RNA, 41 nt, synthetic construct
  source 1..41: mol_type = other RNA
ggtccaccaccctgatgctgtagccaaattcgttgtcatac

SEQ ID NO: 4556 - RNA, 41 nt, synthetic construct
  source 1..41: mol_type = other RNA
ggtccaccaccctgttgctgtagccaaattcgttgtcatac

SEQ ID NO: 4557 - RNA, 41 nt, synthetic construct
  source 1..41: mol_type = other RNA
ggtccaccaccccgttgctgcagcaaaacttgttgtcatac

SEQ ID NO: 4558 - RNA, 41 nt, synthetic construct
  source 1..41: mol_type = other RNA
ggtccaccaccctgttgatgtagccgaattcgttgtcatac

SEQ ID NO: 4559 - RNA, 41 nt, synthetic construct
  source 1..41: mol_type = other RNA
ggtccaccaccctgttgcggcagccgcattcgttgtcatac

SEQ ID NO: 4560 - RNA, 41 nt, synthetic construct
  source 1..41: mol_type = other RNA
ggtccaccaccatgttgctgcagccaactcggttgtcatac

SEQ ID NO: 4561 - RNA, 41 nt, synthetic construct
  source 1..41: mol_type = other RNA
ggtccaccaccttgttgatgtagccaaattcgttgtcatac

SEQ ID NO: 4562 - RNA, 41 nt, synthetic construct
  source 1..41: mol_type = other RNA
ggtccaccactctgttactgtagccaaattcgttgtcatac

SEQ ID NO: 4563 - RNA, 41 nt, synthetic construct
  source 1..41: mol_type = other RNA
ggtccaccaccctgctgctgtagccaaattcgttgtcatac

SEQ ID NO: 4564 - RNA, 41 nt, synthetic construct
  source 1..41: mol_type = other RNA
ggtccaccaccctggtgctgcagccaaattcgttgtcatac

SEQ ID NO: 4565 - RNA, 41 nt, synthetic construct
  source 1..41: mol_type = other RNA
ggtccaccaccctgttgatgcagccgaattcgttgtcatac

SEQ ID NO: 4566 - RNA, 41 nt, synthetic construct
  source 1..41: mol_type = other RNA
ggtccaccaccctgttgatgtagccaaattcgttgtcatac

SEQ ID NO: 4567 - RNA, 41 nt, synthetic construct
  source 1..41: mol_type = other RNA
ggtccaccaccctgcggctgcagccacatacgttgtcatac

SEQ ID NO: 4568 - RNA, 41 nt, synthetic construct
  source 1..41: mol_type = other RNA
ggtccaccactctgttactgcagccaaattcgttgtcatac

SEQ ID NO: 4569 - RNA, 41 nt, synthetic construct
  source 1..41: mol_type = other RNA
ggtccaccaccctgccgctgcagcccaattcgttgtcatac

SEQ ID NO: 4570 - RNA, 41 nt, synthetic construct
  source 1..41: mol_type = other RNA
ggtccaccactctgttgctgtagccgaattcgttgtcatac

SEQ ID NO: 4571 - RNA, 41 nt, synthetic construct
  source 1..41: mol_type = other RNA
catgtgggccatgaggtccaccaccatcttgttgcagccaa

SEQ ID NO: 4572 - RNA, 41 nt, synthetic construct
  source 1..41: mol_type = other RNA
ggtccaccaccttgtaactgcagccaacggcgttgtcatac

SEQ ID NO: 4573 - RNA, 41 nt, synthetic construct
  source 1..41: mol_type = other RNA
ggtccaccaccctgtatctgcagccaaattcgttgtcatac

SEQ ID NO: 4574 - RNA, 41 nt, synthetic construct
  source 1..41: mol_type = other RNA
ggtccaccaccctgatgctgcagccaaattcgttgtcatac

SEQ ID NO: 4575 - RNA, 41 nt, synthetic construct
  source 1..41: mol_type = other RNA
ggtccaccaccctgttcctgtagccaaattcgttgtcatac

SEQ ID NO: 4576 - RNA, 41 nt, synthetic construct
  source 1..41: mol_type = other RNA
ggtccaccaccctgatgctgcagccaaactcgttgtcatac

SEQ ID NO: 4577 - RNA, 41 nt, synthetic construct
  source 1..41: mol_type = other RNA
ggtccaccaccctgtggctgtagccaaattcgttgtcatac

SEQ ID NO: 4578 - RNA, 41 nt, synthetic construct
  source 1..41: mol_type = other RNA
ggtccaccaccctgctgctgcagccaaattcgttgtcatac

SEQ ID NO: 4579 - RNA, 41 nt, synthetic construct
  source 1..41: mol_type = other RNA
ggtccaccaccctgtggctgcagccaaattcgttgtcatac

SEQ ID NO: 4580 - RNA, 41 nt, synthetic construct
  source 1..41: mol_type = other RNA
ggtccaccaccctgtgactgtagccaaattcgttgtcatac

SEQ ID NO: 4581 - RNA, 41 nt, synthetic construct
  source 1..41: mol_type = other RNA
catgtgggccatgaggtccaccacaatcttgttgcagccaa

SEQ ID NO: 4582 - RNA, 41 nt, synthetic construct
  source 1..41: mol_type = other RNA
ggtccaccaccctgtcgatgtagccaaattcgttgtcatac

SEQ ID NO: 4583 - RNA, 41 nt, synthetic construct
  source 1..41: mol_type = other RNA
ggtccaccaccctgtgggtgcagccaaattcgttgtcatac

SEQ ID NO: 4584 - RNA, 41 nt, synthetic construct
  source 1..41: mol_type = other RNA
ggtccaccactctgctgctgcagcccaattcgttgtcatac

SEQ ID NO: 4585 - RNA, 41 nt, synthetic construct
  source 1..41: mol_type = other RNA
ggtccaccaccttgttgatgcagccaaattcgttgtcatac

SEQ ID NO: 4586 - RNA, 41 nt, synthetic construct
  source 1..41: mol_type = other RNA
ggtccaccacgctgttgctgcagccaaattcgttgtcatac

SEQ ID NO: 4587 - RNA, 41 nt, synthetic construct
  source 1..41: mol_type = other RNA
catgtgggccatgaggtccaccactctgttactgcagccaa

SEQ ID NO: 4588 - RNA, 41 nt, synthetic construct
  source 1..41: mol_type = other RNA
ggtccaccaccctgctggtgcagccagaatcgttgtcatac

SEQ ID NO: 4589 - RNA, 41 nt, synthetic construct
  source 1..41: mol_type = other RNA
catgtgggccatgaggtccaccacactgttgctgtagccaa

SEQ ID NO: 4590 - RNA, 41 nt, synthetic construct
  source 1..41: mol_type = other RNA
ggtccaccaccctgttgctgcaaccgaattcgttgtcatac

SEQ ID NO: 4591 - RNA, 41 nt, synthetic construct
  source 1..41: mol_type = other RNA
ggtccaccacccttttgctgcagcaaatttcgttgtcatac

SEQ ID NO: 4592 - RNA, 41 nt, synthetic construct
  source 1..41: mol_type = other RNA
ggtccaccaccctgttactgtagccaaattcgttgtcatac

SEQ ID NO: 4593 - RNA, 41 nt, synthetic construct
  source 1..41: mol_type = other RNA
ggtccaccaccgtgttgctgcagccacgttggttgtcatac

SEQ ID NO: 4594 - RNA, 41 nt, synthetic construct
  source 1..41: mol_type = other RNA
ggtccaccaccctgttgatgcagccaaattcgttgtcatac

SEQ ID NO: 4595 - RNA, 41 nt, synthetic construct
  source 1..41: mol_type = other RNA
ggtccaccaccctgtgggtgtagccaaattcgttgtcatac

SEQ ID NO: 4596 - RNA, 41 nt, synthetic construct
  source 1..41: mol_type = other RNA
ggtccaccaccctgttcctgcagccaaattcgttgtcatac

SEQ ID NO: 4597 - RNA, 41 nt, synthetic construct
  source 1..41: mol_type = other RNA
ggtccaccactctgcccctgcagccgaattcgttgtcatac

SEQ ID NO: 4598 - RNA, 42 nt, synthetic construct
  source 1..42: mol_type = other RNA
ggtccaccaccctagttgatgtagccaaattcgttgtcatac

SEQ ID NO: 4599 - RNA, 41 nt, synthetic construct
  source 1..41: mol_type = other RNA
catgtgggccatgaggtccagcaccctgttgctgcagccaa

SEQ ID NO: 4600 - RNA, 41 nt, synthetic construct
  source 1..41: mol_type = other RNA
ggtccaccaccctgtcgatgcagccaaattcgttgtcatac

SEQ ID NO: 4601 - RNA, 41 nt, synthetic construct
  source 1..41: mol_type = other RNA
ggtccaccacggtgtggctgcagccaaattcgttgtcatac

SEQ ID NO: 4602 - RNA, 41 nt, synthetic construct
  source 1..41: mol_type = other RNA
ggtccaccacactgttgctgtagccaaatgcgttgtcatac

SEQ ID NO: 4603 - RNA, 41 nt, synthetic construct
  source 1..41: mol_type = other RNA
catgtgggccatgaggtccaacaccctgttgctgcagccaa

SEQ ID NO: 4604 - RNA, 42 nt, synthetic construct
  source 1..42: mol_type = other RNA
ggtccaccaccctagttgctgcagccaccttcgttgtcatac

SEQ ID NO: 4605 - RNA, 41 nt, synthetic construct
  source 1..41: mol_type = other RNA
ggtccaccaccatgttgctgcagccaaattcgttgtcatac

SEQ ID NO: 4606 - RNA, 41 nt, synthetic construct
  source 1..41: mol_type = other RNA
ggtccaccaccctgttgctgcagccagattcgttgtcatac

SEQ ID NO: 4607 - RNA, 41 nt, synthetic construct
  source 1..41: mol_type = other RNA
catgtgggccatgaggtccaacacaacattgctgcaaccaa

SEQ ID NO: 4608 - RNA, 41 nt, synthetic construct
  source 1..41: mol_type = other RNA
ggtccaccaccctgtggctgcagccagattcgttgtcatac

SEQ ID NO: 4609 - RNA, 41 nt, synthetic construct
  source 1..41: mol_type = other RNA
ggtccaccaccctgttgctgcagctaaattcgttgtcatac

SEQ ID NO: 4610 - RNA, 41 nt, synthetic construct
  source 1..41: mol_type = other RNA
ggtccaccacctcgttgctgcagtccaattcgttgtcatac

SEQ ID NO: 4611 - RNA, 41 nt, synthetic construct
  source 1..41: mol_type = other RNA
ggtccaccactttgttggtgcagccaaaatcgttgtcatac

SEQ ID NO: 4612 - RNA, 41 nt, synthetic construct
  source 1..41: mol_type = other RNA
ggtccaccaccctgttgctgtaaccgaattcgttgtcatac

SEQ ID NO: 4613 - RNA, 41 nt, synthetic construct
  source 1..41: mol_type = other RNA
ggtccaccaccctgtggctgtagccagattcgttgtcatac

SEQ ID NO: 4614 - RNA, 41 nt, synthetic construct
  source 1..41: mol_type = other RNA
catgtgggccatgaggtccaccaccctcttgctgcaaccaa

SEQ ID NO: 4615 - RNA, 41 nt, synthetic construct
  source 1..41: mol_type = other RNA
ggtccaccaccctgttaccgcagccaaactcgttgtcatac

SEQ ID NO: 4616 - RNA, 41 nt, synthetic construct
  source 1..41: mol_type = other RNA
ggtccaccactctgttgctgcagccgaattcgttgtcatac

SEQ ID NO: 4617 - RNA, 41 nt, synthetic construct
  source 1..41: mol_type = other RNA
catgtgggccatgaggtccaacaccctgtgggtgcagccaa

SEQ ID NO: 4618 - RNA, 42 nt, synthetic construct
  source 1..42: mol_type = other RNA
ggtccaccactctgttgctgtaacctaaattcgttgtcatac

SEQ ID NO: 4619 - RNA, 42 nt, synthetic construct
  source 1..42: mol_type = other RNA
catgtgggccatgaggtccaccaccagagttgttgcagccaa

SEQ ID NO: 4620 - RNA, 42 nt, synthetic construct
  source 1..42: mol_type = other RNA
ggtccaccaccctagttgatgcagccaaattcgttgtcatac

SEQ ID NO: 4621 - RNA, 41 nt, synthetic construct
  source 1..41: mol_type = other RNA
ggtccaccaccctgttgctgcagcgcaattcgttgtcatac

SEQ ID NO: 4622 - RNA, 41 nt, synthetic construct
  source 1..41: mol_type = other RNA
ggtccaccaccttgttggtgcagccaaattcgttgtcatac

SEQ ID NO: 4623 - RNA, 41 nt, synthetic construct
  source 1..41: mol_type = other RNA
catgtgggccatgaggtccaccaccctgttaccgcagccaa

SEQ ID NO: 4624 - RNA, 41 nt, synthetic construct
  source 1..41: mol_type = other RNA
ggtccaccaccctgttgctgcaaccaaattcgttgtcatac

SEQ ID NO: 4625 - RNA, 41 nt, synthetic construct
  source 1..41: mol_type = other RNA
ggtccaccaccctggtgctgtagccaaattcgttgtcatac

SEQ ID NO: 4626 - RNA, 41 nt, synthetic construct
  source 1..41: mol_type = other RNA
ggtccaccaccccgttgctgcagccacgttcgttgtcatac

SEQ ID NO: 4627 - RNA, 41 nt, synthetic construct
  source 1..41: mol_type = other RNA
ggtccaccaccaagttgctgtagccagattcgttgtcatac

SEQ ID NO: 4628 - RNA, 41 nt, synthetic construct
  source 1..41: mol_type = other RNA
ggtccaccaccctgtgactgcagccaaattcgttgtcatac

SEQ ID NO: 4629 - RNA, 41 nt, synthetic construct
  source 1..41: mol_type = other RNA
ggtccaccaccctgttgcggcagccaaattcgttgtcatac

SEQ ID NO: 4630 - RNA, 41 nt, synthetic construct
  source 1..41: mol_type = other RNA
ggtccaccacaatgttgctgcagccaacttcgttgtcatac

SEQ ID NO: 4631 - RNA, 41 nt, synthetic construct
  source 1..41: mol_type = other RNA
ggtccaccaccctgttgttgtagccaagttcgttgtcatac

SEQ ID NO: 4632 - RNA, 41 nt, synthetic construct
  source 1..41: mol_type = other RNA
catgtgggccatgaggtccaccactctgccgctgtagccaa

SEQ ID NO: 4633 - RNA, 41 nt, synthetic construct
  source 1..41: mol_type = other RNA
catgtgggccatgaggtccaccacacatttgctgtagccaa

SEQ ID NO: 4634 - RNA, 41 nt, synthetic construct
  source 1..41: mol_type = other RNA
ggtccaccaccctgcccctgcagccaaattcgttgtcatac

SEQ ID NO: 4635 - RNA, 41 nt, synthetic construct
  source 1..41: mol_type = other RNA
catgtgggccatgaggtccaccaacctgttgctgcagccaa

SEQ ID NO: 4636 - RNA, 41 nt, synthetic construct
  source 1..41: mol_type = other RNA
catgtgggccatgaggtccaccacccggttgctgtagccaa

SEQ ID NO: 4637 - RNA, 41 nt, synthetic construct
  source 1..41: mol_type = other RNA
ggtccaccaccaagttgctgcagccagattcgttgtcatac

SEQ ID NO: 4638 - RNA, 41 nt, synthetic construct
  source 1..41: mol_type = other RNA
catgtgggccatgaggtccaccacccaggcgctgcagccaa

SEQ ID NO: 4639 - RNA, 41 nt, synthetic construct
  source 1..41: mol_type = other RNA
catgtgggccatgaggtccaccaacctgttggcgcagccaa

SEQ ID NO: 4640 - RNA, 41 nt, synthetic construct
  source 1..41: mol_type = other RNA
ggtccaccaccctgttgctgcagccgaacttgttgtcatac

SEQ ID NO: 4641 - RNA, 41 nt, synthetic construct
  source 1..41: mol_type = other RNA
ggtccaccactttgccgctgcagccaaattcgttgtcatac

SEQ ID NO: 4642 - RNA, 41 nt, synthetic construct
  source 1..41: mol_type = other RNA
catgtgggccatgaggtccaccacaaggctgctgcagccac

SEQ ID NO: 4643 - RNA, 41 nt, synthetic construct
  source 1..41: mol_type = other RNA
ggtccaccaccctggtgctgcagccgaattcgttgtcatac

SEQ ID NO: 4644 - RNA, 42 nt, synthetic construct
  source 1..42: mol_type = other RNA
catgtgggccatgaggtccaccaccccatttgctgcagccat

SEQ ID NO: 4645 - RNA, 41 nt, synthetic construct
  source 1..41: mol_type = other RNA
catgtgggccatgaggtccaccaccctgttgcggcagccaa

SEQ ID NO: 4646 - RNA, 41 nt, synthetic construct
  source 1..41: mol_type = other RNA
ggtccaccaccctgttgctgcagccaaattcgttgtcatac

SEQ ID NO: 4647 - RNA, 41 nt, synthetic construct
  source 1..41: mol_type = other RNA
ggtccaccacccagttgcagcagccgaattcgttgtcatac

SEQ ID NO: 4648 - RNA, 41 nt, synthetic construct
  source 1..41: mol_type = other RNA
catgtgggccatgaggtccacaacccagcagctgcagccaa

SEQ ID NO: 4649 - RNA, 41 nt, synthetic construct
  source 1..41: mol_type = other RNA
ggtccaccactatgttgctgcagccaaattcgttgtcatac

SEQ ID NO: 4650 - RNA, 41 nt, synthetic construct
  source 1..41: mol_type = other RNA
ggtccaccacccggttgctgtagccaaattcgttgtcatac

SEQ ID NO: 4651 - RNA, 41 nt, synthetic construct
  source 1..41: mol_type = other RNA
catgtgggccatgaggtccaccaccctgctgctgtagccaa

SEQ ID NO: 4652 - RNA, 41 nt, synthetic construct
  source 1..41: mol_type = other RNA
ggtccaccaccctgttgctgtagccaatttcgttgtcatac

SEQ ID NO: 4653 - RNA, 42 nt, synthetic construct
  source 1..42: mol_type = other RNA
catgtgggccatgaggtccaccacccaattgcaagcagccaa

SEQ ID NO: 4654 - RNA, 41 nt, synthetic construct
  source 1..41: mol_type = other RNA
ggtccaccacactgttgcagcagccacattcgttgtcatac

SEQ ID NO: 4655 - RNA, 41 nt, synthetic construct
  source 1..41: mol_type = other RNA
ggtccaccaccttggtgctgtagccaaatcagttgtcatac

SEQ ID NO: 4656 - RNA, 41 nt, synthetic construct
  source 1..41: mol_type = other RNA
ggtccaccaccctgttgttgcagccagattcgttgtcatac

SEQ ID NO: 4657 - RNA, 41 nt, synthetic construct
  source 1..41: mol_type = other RNA
ggtccaccactctgttgctgcaaacgaattcgttgtcatac

SEQ ID NO: 4658 - RNA, 41 nt, synthetic construct
  source 1..41: mol_type = other RNA
ggtccaccacaacattgctgcaaccaaattcgttgtcatac

SEQ ID NO: 4659 - RNA, 41 nt, synthetic construct
  source 1..41: mol_type = other RNA
catgtgggccatgaggtccaacaccctgttgatgcagccaa

SEQ ID NO: 4660 - RNA, 41 nt, synthetic construct
  source 1..41: mol_type = other RNA
catgtgggccatgaggtccacaaccctggtgctgcagccaa

SEQ ID NO: 4661 - RNA, 41 nt, synthetic construct
  source 1..41: mol_type = other RNA
ggtccaccaccctgttgcggtagccaaattcgttgtcatac

SEQ ID NO: 4662 - RNA, 41 nt, synthetic construct
  source 1..41: mol_type = other RNA
catgtgggccatgaggtccaccaccatgttgctgcagccaa

SEQ ID NO: 4663 - RNA, 41 nt, synthetic construct
  source 1..41: mol_type = other RNA
ggtccaccacccagttgctgcagccaaatgcgttgtcatac

SEQ ID NO: 4664 - RNA, 41 nt, synthetic construct
  source 1..41: mol_type = other RNA
ggtccaccacactgttgctgcagccaaatgcgttgtcatac

SEQ ID NO: 4665 - RNA, 41 nt, synthetic construct
  source 1..41: mol_type = other RNA
catgtgggccatgaggtccacccctctgttgctgcagccaa

SEQ ID NO: 4666 - RNA, 41 nt, synthetic construct
  source 1..41: mol_type = other RNA
catgtgggccatgaggtccaccacaagctggctgcagccaa

SEQ ID NO: 4667 - RNA, 41 nt, synthetic construct
  source 1..41: mol_type = other RNA
catgtgggccatgaggtccaccagcctgtaactgcagccaa

SEQ ID NO: 4668 - RNA, 41 nt, synthetic construct
  source 1..41: mol_type = other RNA
catgtgggccatgaggtccaccactctgcccctgcagccaa

SEQ ID NO: 4669 - RNA, 41 nt, synthetic construct
  source 1..41: mol_type = other RNA
ttgctgcaaccaaattcgttgtcataccaggaaatgagctt

SEQ ID NO: 4670 - RNA, 41 nt, synthetic construct
  source 1..41: mol_type = other RNA
catgtgggccatgaggtccaccaccctgcccctgtagccaa

SEQ ID NO: 4671 - RNA, 41 nt, synthetic construct
  source 1..41: mol_type = other RNA
catgtgggccatgaggtccaccgccctgcggctgcagccac

SEQ ID NO: 4672 - RNA, 47 nt, synthetic construct
  source 1..47: mol_type = other RNA
ttgctgcagccctaggatctttcgttgtcataccaggaaatgagctt

SEQ ID NO: 4673 - RNA, 41 nt, synthetic construct
  source 1..41: mol_type = other RNA
ggtccaccaccctgttgatgtagccaagttggttgtcatac

SEQ ID NO: 4674 - RNA, 41 nt, synthetic construct
  source 1..41: mol_type = other RNA
catgtgggccatgaggtccaccacccaagtgctgcagccaa

SEQ ID NO: 4675 - RNA, 41 nt, synthetic construct
  source 1..41: mol_type = other RNA
catgtgggccatgaggtccaccactctgctgctgcagccca

SEQ ID NO: 4676 - RNA, 40 nt, synthetic construct
  source 1..40: mol_type = other RNA
ggtccaccactcaattgcggcagccaggttgttgtcatac

SEQ ID NO: 4677 - RNA, 41 nt, synthetic construct
  source 1..41: mol_type = other RNA
catgtgggccatgaggtccaccacgctgttgctgcagccaa

SEQ ID NO: 4678 - RNA, 41 nt, synthetic construct
  source 1..41: mol_type = other RNA
ggtccaccacgctgttgttgcagccaaattcgttgtcatac

SEQ ID NO: 4679 - RNA, 41 nt, synthetic construct
  source 1..41: mol_type = other RNA
ggtccaccaccatcttgttgcagccaatttggttgtcatac

SEQ ID NO: 4680 - RNA, 41 nt, synthetic construct
  source 1..41: mol_type = other RNA
catgtgggccatgaggtccaccactctgttgctgcagccaa

SEQ ID NO: 4681 - RNA, 41 nt, synthetic construct
  source 1..41: mol_type = other RNA
catgtgggccatgaggtccaccactatgttgctgcagccaa

SEQ ID NO: 4682 - RNA, 41 nt, synthetic construct
  source 1..41: mol_type = other RNA
ggtccaccaccccgacgctgcaaccaaattcgttgtcatac

SEQ ID NO: 4683 - RNA, 41 nt, synthetic construct
  source 1..41: mol_type = other RNA
ggtccaccaccccgttgctgcagccacactcgttgtcatac

SEQ ID NO: 4684 - RNA, 41 nt, synthetic construct
  source 1..41: mol_type = other RNA
catgtgggccatgaggtccaccaccctgttgatgcagccaa

SEQ ID NO: 4685 - RNA, 41 nt, synthetic construct
  source 1..41: mol_type = other RNA
ggtccaccaccctgttgttgcagccaaacccgttgtcatac

SEQ ID NO: 4686 - RNA, 41 nt, synthetic construct
  source 1..41: mol_type = other RNA
ggtccaccaccctgttgctgcagccagattagttgtcatac

SEQ ID NO: 4687 - RNA, 41 nt, synthetic construct
  source 1..41: mol_type = other RNA
catgtgggccatgaggtccaccactctgatgctgcagacaa

SEQ ID NO: 4688 - RNA, 41 nt, synthetic construct
  source 1..41: mol_type = other RNA
ggtccaccacaatcttgttgcagccaacgtggttgtcatac

SEQ ID NO: 4689 - RNA, 41 nt, synthetic construct
  source 1..41: mol_type = other RNA
catgtgggccatgaggtccacaactctgttgttgcagccaa

SEQ ID NO: 4690 - RNA, 41 nt, synthetic construct
  source 1..41: mol_type = other RNA
catgtgggccatgaggtccaaacccctgttgctgtagccaa

SEQ ID NO: 4691 - RNA, 41 nt, synthetic construct
  source 1..41: mol_type = other RNA
ggtccaccaccctgtagctgtagccaaattcgttgtcatac

SEQ ID NO: 4692 - RNA, 41 nt, synthetic construct
  source 1..41: mol_type = other RNA
catgtgggccatgaggtccaacaccctgttgatgtagccaa

SEQ ID NO: 4693 - RNA, 41 nt, synthetic construct
  source 1..41: mol_type = other RNA
catgtgggccatgaggtccaccacccaactgctgcagccaa

SEQ ID NO: 4694 - RNA, 41 nt, synthetic construct
  source 1..41: mol_type = other RNA
ggtccaccacactgttgctgcagccaaattcgttgtcatac

SEQ ID NO: 4695 - RNA, 41 nt, synthetic construct
  source 1..41: mol_type = other RNA
ggtccaccaccctgtagctgcagccaaattcgttgtcatac

SEQ ID NO: 4696 - RNA, 41 nt, synthetic construct
  source 1..41: mol_type = other RNA
catgtgggccatgaggtccaacaccctgttgctgtagccaa

SEQ ID NO: 4697 - RNA, 41 nt, synthetic construct
  source 1..41: mol_type = other RNA
ggtccaccacccagttgctgcagccaaattcgttgtcatac

SEQ ID NO: 4698 - RNA, 41 nt, synthetic construct
  source 1..41: mol_type = other RNA
catgtgggccatgaggtccagcaccctgttgctgtagccaa

SEQ ID NO: 4699 - RNA, 40 nt, synthetic construct
  source 1..40: mol_type = other RNA
catgtgggccatgaggtccaccaccctgtgctgtagccaa

SEQ ID NO: 4700 - RNA, 41 nt, synthetic construct
  source 1..41: mol_type = other RNA
ggtccaccacccagttgctgtagccaaattcgttgtcatac

SEQ ID NO: 4701 - RNA, 42 nt, synthetic construct
  source 1..42: mol_type = other RNA
ggtccaccaccccatttgctgcagccatattcgttgtcatac

SEQ ID NO: 4702 - RNA, 41 nt, synthetic construct
  source 1..41: mol_type = other RNA
catgtgggccatgaggtccaccactcaattgcggcagccaa

SEQ ID NO: 4703 - RNA, 37 nt, synthetic construct
  source 1..37: mol_type = other RNA
ggtccaccactttgttgctgtagccctgttgtcatac

SEQ ID NO: 4704 - RNA, 41 nt, synthetic construct
  source 1..41: mol_type = other RNA
ggtccaccaccctgttgctgtagccaaataagttgtcatac

SEQ ID NO: 4705 - RNA, 41 nt, synthetic construct
  source 1..41: mol_type = other RNA
catgtgggccatgaggtccaccacccaagtgctgtaaccaa

SEQ ID NO: 4706 - RNA, 41 nt, synthetic construct
  source 1..41: mol_type = other RNA
ggtccaccaccctgttgctgtagctaaattcgttgtcatac

SEQ ID NO: 4707 - RNA, 41 nt, synthetic construct
  source 1..41: mol_type = other RNA
catgtgggccatgaggtccaccaccccgttgctgtagcaaa

SEQ ID NO: 4708 - RNA, 42 nt, synthetic construct
  source 1..42: mol_type = other RNA
ggtccaccaccctagttgctgtagccaccttcgttgtcatac

SEQ ID NO: 4709 - RNA, 40 nt, synthetic construct
  source 1..40: mol_type = other RNA
catgtgggccatgaggtccaccaccatgtcctgcagccac

SEQ ID NO: 4710 - RNA, 47 nt, synthetic construct
  source 1..47: mol_type = other RNA
ggtccaccaccctgttgctgcagccaggggatctttcgttgtcatac

SEQ ID NO: 4711 - RNA, 41 nt, synthetic construct
  source 1..41: mol_type = other RNA
catgtgggccatgaggtccaccacccagttgctgtagctaa

SEQ ID NO: 4712 - RNA, 41 nt, synthetic construct
  source 1..41: mol_type = other RNA
ggtccaccaccctgttgctgtagccagattcgttgtcatac

SEQ ID NO: 4713 - RNA, 41 nt, synthetic construct
  source 1..41: mol_type = other RNA
catgtgggccatgaggtccaccaccctgttcctgtagccaa

SEQ ID NO: 4714 - RNA, 41 nt, synthetic construct
  source 1..41: mol_type = other RNA
catgtgggccatgaggtccaccaccaagttgctgcagccaa

SEQ ID NO: 4715 - RNA, 41 nt, synthetic construct
  source 1..41: mol_type = other RNA
catgtgggccatgaggtccaccaccctgtcgctgtagccaa

SEQ ID NO: 4716 - RNA, 41 nt, synthetic construct
  source 1..41: mol_type = other RNA
ggtccaccaccgtgttgctgtagccacgttggttgtcatac

SEQ ID NO: 4717 - RNA, 41 nt, synthetic construct
  source 1..41: mol_type = other RNA
catgtgggccatgaggtccaccaccctgatgctgcagccaa

SEQ ID NO: 4718 - RNA, 41 nt, synthetic construct
  source 1..41: mol_type = other RNA
catgtgggccatgaggtccaccaccatgttgctgtagccaa

SEQ ID NO: 4719 - RNA, 44 nt, synthetic construct
  source 1..44: mol_type = other RNA
ggtccaccaccctcttgtgactgcagccaatggcgttgtcatac

SEQ ID NO: 4720 - RNA, 41 nt, synthetic construct
  source 1..41: mol_type = other RNA
catgtgggccatgaggtccaccaccctgtatctgtagccaa

SEQ ID NO: 4721 - RNA, 41 nt, synthetic construct
  source 1..41: mol_type = other RNA
catgtgggccatgaggtccaccacaatgttgctgcagccaa

SEQ ID NO: 4722 - RNA, 41 nt, synthetic construct
  source 1..41: mol_type = other RNA
catgtgggccatgaggtccaccaccctgttgttgttaccac

SEQ ID NO: 4723 - RNA, 41 nt, synthetic construct
  source 1..41: mol_type = other RNA
catgtgggccatgaggtccaccaccctcttgctgtaaccaa

SEQ ID NO: 4724 - RNA, 41 nt, synthetic construct
  source 1..41: mol_type = other RNA
catgtgggccatgaggtccacaaccctgtggctgcagccaa

SEQ ID NO: 4725 - RNA, 41 nt, synthetic construct
  source 1..41: mol_type = other RNA
catgtgggccatgaggtccaccaccgtgttgctgtagccac

SEQ ID NO: 4726 - RNA, 42 nt, synthetic construct
  source 1..42: mol_type = other RNA
catgtgggccatgaggtccaccaccctagttgctgtagccac

SEQ ID NO: 4727 - RNA, 40 nt, synthetic construct
  source 1..40: mol_type = other RNA
tgctgcagccaaattcgttgtcataccaggaaatgagctt

SEQ ID NO: 4728 - RNA, 41 nt, synthetic construct
  source 1..41: mol_type = other RNA
ggtccaccaccctgttactgcagccaaattcgttgtcatac

SEQ ID NO: 4729 - RNA, 41 nt, synthetic construct
  source 1..41: mol_type = other RNA
ggtccaccaccctgttgttgcagccaagttcgttgtcatac

SEQ ID NO: 4730 - RNA, 41 nt, synthetic construct
  source 1..41: mol_type = other RNA
ggtccaccacctaattgctgtagccaaattcgttgtcatac

SEQ ID NO: 4731 - RNA, 47 nt, synthetic construct
  source 1..47: mol_type = other RNA
ttgctgcagccaagtgatctttcgttgtcataccaggaaatgagctt

SEQ ID NO: 4732 - RNA, 41 nt, synthetic construct
  source 1..41: mol_type = other RNA
ggtccaccacccagttgctgtagccaaatgcgttgtcatac

SEQ ID NO: 4733 - RNA, 41 nt, synthetic construct
  source 1..41: mol_type = other RNA
catgtgggccatgaggtccaccacccatgtgctgcaaccaa

SEQ ID NO: 4734 - RNA, 41 nt, synthetic construct
  source 1..41: mol_type = other RNA
catgtgggccatgaggtccaccaccctgtcgctgtaaccaa

SEQ ID NO: 4735 - RNA, 41 nt, synthetic construct
  source 1..41: mol_type = other RNA
ggtccaccaccctgttgctgcagccaatttcgttgtcatac

SEQ ID NO: 4736 - RNA, 41 nt, synthetic construct
  source 1..41: mol_type = other RNA
catgtgggccatgaggtccaccactctgttactgtagccaa

SEQ ID NO: 4737 - RNA, 41 nt, synthetic construct
  source 1..41: mol_type = other RNA
catgtgggccatgaggtccaccaccctgtatctgcagccaa

SEQ ID NO: 4738 - RNA, 41 nt, synthetic construct
  source 1..41: mol_type = other RNA
ggtccaccactctgctgctgtagcccaattcgttgtcatac

SEQ ID NO: 4739 - RNA, 41 nt, synthetic construct
  source 1..41: mol_type = other RNA
ggtccaccaccctgttgctgcagcccactttgttgtcatac

SEQ ID NO: 4740 - RNA, 41 nt, synthetic construct
  source 1..41: mol_type = other RNA
catgtgggccatgaggtccaccaatctgttgctgcagccct

SEQ ID NO: 4741 - RNA, 37 nt, synthetic construct
  source 1..37: mol_type = other RNA
ggtccaccactttgttgctgcagccctgttgtcatac

SEQ ID NO: 4742 - RNA, 41 nt, synthetic construct
  source 1..41: mol_type = other RNA
catgtgggccatgaggtccaccaccctggggctatagccaa

SEQ ID NO: 4743 - RNA, 41 nt, synthetic construct
  source 1..41: mol_type = other RNA
catgtgggccatgaggtccaccaccctgtagctgtagccaa

SEQ ID NO: 4744 - RNA, 41 nt, synthetic construct
  source 1..41: mol_type = other RNA
catgtgggccatgaggtccaccaccctgttaccgtagccaa

SEQ ID NO: 4745 - RNA, 41 nt, synthetic construct
  source 1..41: mol_type = other RNA
ggtccaccacaaggctgctgcagccacattcgttgtcatac

SEQ ID NO: 4746 - RNA, 41 nt, synthetic construct
  source 1..41: mol_type = other RNA
catgtgggccatgaggtccaccaccctgtcgctgcaaccaa

SEQ ID NO: 4747 - RNA, 41 nt, synthetic construct
  source 1..41: mol_type = other RNA
catgtgggccatgaggtccacaaccctggtgctgtagccaa

SEQ ID NO: 4748 - RNA, 40 nt, synthetic construct
  source 1..40: mol_type = other RNA
catgtgggccatgaggtccaccccctgttgatgcagccaa

SEQ ID NO: 4749 - RNA, 39 nt, synthetic construct
  source 1..39: mol_type = other RNA
catgtgggccatgaggtccaccaccctgtttgcagctaa

SEQ ID NO: 4750 - RNA, 41 nt, synthetic construct
  source 1..41: mol_type = other RNA
ggtccaccaccctgttgctgcagcctaccgtgttgtcatac

SEQ ID NO: 4751 - RNA, 41 nt, synthetic construct
  source 1..41: mol_type = other RNA
catgtgggccatgaggtccaccaccctgttactgtagccaa

SEQ ID NO: 4752 - RNA, 41 nt, synthetic construct
  source 1..41: mol_type = other RNA
ggtccaccactttgccgctgtagccaaattcgttgtcatac

SEQ ID NO: 4753 - RNA, 41 nt, synthetic construct
  source 1..41: mol_type = other RNA
ggtccaccactttgttgttgcagccaagttcgttgtcatac

SEQ ID NO: 4754 - RNA, 41 nt, synthetic construct
  source 1..41: mol_type = other RNA
ggtccaccaccctgttgttgaagccagattcgttgtcatac

SEQ ID NO: 4755 - RNA, 41 nt, synthetic construct
  source 1..41: mol_type = other RNA
ggtccaccaccctgttgctgaagccaaattcgttgtcatac

SEQ ID NO: 4756 - RNA, 41 nt, synthetic construct
  source 1..41: mol_type = other RNA
catgtgggccatgaggtccacccctctgttgctgtagccaa

SEQ ID NO: 4757 - RNA, 41 nt, synthetic construct
  source 1..41: mol_type = other RNA
catgtgggccatgaggtccaccacccaattgctgtagccaa

SEQ ID NO: 4758 - RNA, 42 nt, synthetic construct
  source 1..42: mol_type = other RNA
catgtgggccatgaggtccaccactctgttgctgtaacctaa

SEQ ID NO: 4759 - RNA, 41 nt, synthetic construct
  source 1..41: mol_type = other RNA
catgtgggccatgaggtccactagactgttgctgcaacaaa

SEQ ID NO: 4760 - RNA, 42 nt, synthetic construct
  source 1..42: mol_type = other RNA
catgtgggccatgaggtccaccactctgttgctgcaacctaa

SEQ ID NO: 4761 - RNA, 41 nt, synthetic construct
  source 1..41: mol_type = other RNA
ggtccaccacacatttgctgcagccaaattcgttgtcatac

SEQ ID NO: 4762 - RNA, 41 nt, synthetic construct
  source 1..41: mol_type = other RNA
catgtgggccatgaggtccaccaccccgacgctgcaaccaa

SEQ ID NO: 4763 - RNA, 44 nt, synthetic construct
  source 1..44: mol_type = other RNA
catgtgggccatgaggtccaccaccactgaccagctacagccaa

SEQ ID NO: 4764 - RNA, 41 nt, synthetic construct
  source 1..41: mol_type = other RNA
ggtccaccactctgttgctgcagccaaactcgttgtcatac

SEQ ID NO: 4765 - RNA, 41 nt, synthetic construct
  source 1..41: mol_type = other RNA
catgtgggccatgaggtccaccaccctgttactgcagccaa

SEQ ID NO: 4766 - RNA, 41 nt, synthetic construct
  source 1..41: mol_type = other RNA
catgtgggccatgaggtccacccccctgtcgctgcagccaa

SEQ ID NO: 4767 - RNA, 41 nt, synthetic construct
  source 1..41: mol_type = other RNA
catgtgggccatgaggtccaccacccaattgctgcagccaa

SEQ ID NO: 4768 - RNA, 41 nt, synthetic construct
  source 1..41: mol_type = other RNA
ggtccaccactctgttgctgtagccaaactcgttgtcatac

SEQ ID NO: 4769 - RNA, 41 nt, synthetic construct
  source 1..41: mol_type = other RNA
catgtgggccatgaggtccaccacccgaacaaggcagccaa

SEQ ID NO: 4770 - RNA, 40 nt, synthetic construct
  source 1..40: mol_type = other RNA
catgtgggccatgaggtccacaccaagtcgctgcagccaa

SEQ ID NO: 4771 - RNA, 41 nt, synthetic construct
  source 1..41: mol_type = other RNA
ggtccaccaccctgttgctgtagcccactttgttgtcatac

SEQ ID NO: 4772 - RNA, 41 nt, synthetic construct
  source 1..41: mol_type = other RNA
tatctgtagccaaattcgttgtcataccaggaaatgagctt

SEQ ID NO: 4773 - RNA, 41 nt, synthetic construct
  source 1..41: mol_type = other RNA
catgtgggccatgaggtccaccgccctgttgctgtggcaaa

SEQ ID NO: 4774 - RNA, 41 nt, synthetic construct
  source 1..41: mol_type = other RNA
catgtgggccatgaggtccaccactctgttggtgcagccaa

SEQ ID NO: 4775 - RNA, 41 nt, synthetic construct
  source 1..41: mol_type = other RNA
catgtgggccatgaggtccaccaccctgtcgatgcagccaa

SEQ ID NO: 4776 - RNA, 41 nt, synthetic construct
  source 1..41: mol_type = other RNA
catgtgggccatgaggtccaccaccctgttgctgcaaccaa

SEQ ID NO: 4777 - RNA, 41 nt, synthetic construct
  source 1..41: mol_type = other RNA
catgtgggccatgaggtccaccaccgtgttgctgcagccac

SEQ ID NO: 4778 - RNA, 41 nt, synthetic construct
  source 1..41: mol_type = other RNA
tcgctgcaaccaaattcgttgtcataccaggaaatgagctt

SEQ ID NO: 4779 - RNA, 41 nt, synthetic construct
  source 1..41: mol_type = other RNA
catgtgggccatgaggtccaccaccctgtcgatgtagccaa

SEQ ID NO: 4780 - RNA, 41 nt, synthetic construct
  source 1..41: mol_type = other RNA
catgtgggccatgaggtccaccactcaattgcggtagccaa

SEQ ID NO: 4781 - RNA, 44 nt, synthetic construct
  source 1..44: mol_type = other RNA
catgtgggccatgaggtccacctccctcctgtgactgcagccaa

SEQ ID NO: 4782 - RNA, 41 nt, synthetic construct
  source 1..41: mol_type = other RNA
catgtgggccatgaggtccaccaccctgctgctgcagccaa

SEQ ID NO: 4783 - RNA, 41 nt, synthetic construct
  source 1..41: mol_type = other RNA
ggtccaccaccctgcccctgtagccaaattcgttgtcatac

SEQ ID NO: 4784 - RNA, 41 nt, synthetic construct
  source 1..41: mol_type = other RNA
ttgctgcagcctaccgtgtagtcataccaggaaatgagctt

SEQ ID NO: 4785 - RNA, 41 nt, synthetic construct
  source 1..41: mol_type = other RNA
ggtccaccaccctgttgctgcagccaacctcgttgtcatac

SEQ ID NO: 4786 - RNA, 41 nt, synthetic construct
  source 1..41: mol_type = other RNA
ttgctgcagctaaattcgttgtcataccaggaaatgagctt

SEQ ID NO: 4787 - RNA, 41 nt, synthetic construct
  source 1..41: mol_type = other RNA
ggtccaccaccctgttgctgtagccaaattggttgtcatac

SEQ ID NO: 4788 - RNA, 41 nt, synthetic construct
  source 1..41: mol_type = other RNA
catgtgggccatgaggtccaccactctgccgctgcagccaa

SEQ ID NO: 4789 - RNA, 41 nt, synthetic construct
  source 1..41: mol_type = other RNA
gtgctgtagccaaattcgttgtcataccaggaaatgagctt

SEQ ID NO: 4790 - RNA, 41 nt, synthetic construct
  source 1..41: mol_type = other RNA
ttactgtagccaaattcgttgtcataccaggaaatgagctt

SEQ ID NO: 4791 - RNA, 41 nt, synthetic construct
  source 1..41: mol_type = other RNA
catgtgggccatgaggtccaccaccctgttgctgtaaccaa

SEQ ID NO: 4792 - RNA, 41 nt, synthetic construct
  source 1..41: mol_type = other RNA
catgtgggccatgaggtccaccaacctgttgctgaagccaa

SEQ ID NO: 4793 - RNA, 41 nt, synthetic construct
  source 1..41: mol_type = other RNA
ggtccaccacggtgtggctgtagccaaattcgttgtcatac

SEQ ID NO: 4794 - RNA, 41 nt, synthetic construct
  source 1..41: mol_type = other RNA
gtgctgtagccgaattcgttgtcataccaggaaatgagctt

SEQ ID NO: 4795 - RNA, 39 nt, synthetic construct
  source 1..39: mol_type = other RNA
catgtgggccatgaggtccaccaccctgtttgtagctaa

SEQ ID NO: 4796 - RNA, 41 nt, synthetic construct
  source 1..41: mol_type = other RNA
catgtgggccatgaggtccaccactctgttgctgtaaacaa

SEQ ID NO: 4797 - RNA, 42 nt, synthetic construct
  source 1..42: mol_type = other RNA
catgtgggccatgaggtccaccaccctagttgatgcagccaa

SEQ ID NO: 4798 - RNA, 47 nt, synthetic construct
  source 1..47: mol_type = other RNA
ggtccaccaccctgttgctgcagccctaggatctttcgttgtcatac

SEQ ID NO: 4799 - RNA, 41 nt, synthetic construct
  source 1..41: mol_type = other RNA
ggtccaccacctgtgatctgcagccaaatcagttgtcatac

SEQ ID NO: 4800 - RNA, 41 nt, synthetic construct
  source 1..41: mol_type = other RNA
ttgctgcaaccgaattcgttgtcataccaggaaatgagctt

SEQ ID NO: 4801 - RNA, 41 nt, synthetic construct
  source 1..41: mol_type = other RNA
catgtgggccatgaggtccaccacgctgttgttgcagccaa

SEQ ID NO: 4802 - RNA, 37 nt, synthetic construct
  source 1..37: mol_type = other RNA
ggtccaccaccttgtagctgcagccctgttgtcatac

SEQ ID NO: 4803 - RNA, 43 nt, synthetic construct
  source 1..43: mol_type = other RNA
catgtgggccatgaggtccatcaccctgttgctgcagccctaa

SEQ ID NO: 4804 - RNA, 41 nt, synthetic construct
  source 1..41: mol_type = other RNA
ggtccaccaccctgttgctgcagccaaatacgttgtcatac

SEQ ID NO: 4805 - RNA, 41 nt, synthetic construct
  source 1..41: mol_type = other RNA
ggtccaccaccctgttgctgcagccaaattggttgtcatac

SEQ ID NO: 4806 - RNA, 41 nt, synthetic construct
  source 1..41: mol_type = other RNA
catgtgggccatgaggtccaccaatctgttgctgtagccct

SEQ ID NO: 4807 - RNA, 41 nt, synthetic construct
  source 1..41: mol_type = other RNA
ggtccaccaccctgttgctgtagcgcaattcgttgtcatac

SEQ ID NO: 4808 - RNA, 41 nt, synthetic construct
  source 1..41: mol_type = other RNA
catgtgggccatgaggtccaccaccctgatgctgtagccaa

SEQ ID NO: 4809 - RNA, 41 nt, synthetic construct
  source 1..41: mol_type = other RNA
ggtccaccaccctgccgctgtagcccaattcgttgtcatac

SEQ ID NO: 4810 - RNA, 41 nt, synthetic construct
  source 1..41: mol_type = other RNA
ttgctgcaacaaatttcgttgtcataccaggaaatgagctt

SEQ ID NO: 4811 - RNA, 39 nt, synthetic construct
  source 1..39: mol_type = other RNA
ttgctgcaacctaaattcttcataccaggaaatgagctt

SEQ ID NO: 4812 - RNA, 41 nt, synthetic construct
  source 1..41: mol_type = other RNA
catgtgggccatgaggtccaccacactgttgctgcagccaa

SEQ ID NO: 4813 - RNA, 41 nt, synthetic construct
  source 1..41: mol_type = other RNA
catgtgggccatgaggtccaccaccctgttgctgcagcgca

SEQ ID NO: 4814 - RNA, 41 nt, synthetic construct
  source 1..41: mol_type = other RNA
catgtgggccatgaggtccaccaccctgttgctgcagctaa

SEQ ID NO: 4815 - RNA, 41 nt, synthetic construct
  source 1..41: mol_type = other RNA
ttgctgaagccaaattcgttgtcataccaggaaatgagctt

SEQ ID NO: 4816 - RNA, 41 nt, synthetic construct
  source 1..41: mol_type = other RNA
catgtgggccatgaggtccaccacggtgtggctgcagccaa

SEQ ID NO: 4817 - RNA, 37 nt, synthetic construct
  source 1..37: mol_type = other RNA
ttgctgcagccctgttgtcataccaggaaatgagctt

SEQ ID NO: 4818 - RNA, 41 nt, synthetic construct
  source 1..41: mol_type = other RNA
ggtccaccaccctgttgctgcagccaaataagttgtcatac

SEQ ID NO: 4819 - RNA, 41 nt, synthetic construct
  source 1..41: mol_type = other RNA
ggtccaccacccggttgctgcagccaaattcgttgtcatac

SEQ ID NO: 4820 - RNA, 41 nt, synthetic construct
  source 1..41: mol_type = other RNA
catgtgggccatgaggtccaccaccctgttcctgcagccaa

SEQ ID NO: 4821 - RNA, 41 nt, synthetic construct
  source 1..41: mol_type = other RNA
catgtgggccatgaggtccaccacccagttgctgcagctaa

SEQ ID NO: 4822 - RNA, 40 nt, synthetic construct
  source 1..40: mol_type = other RNA
catgtgggccatgaggtccaccaccctgtgctgcagccaa

SEQ ID NO: 4823 - RNA, 41 nt, synthetic construct
  source 1..41: mol_type = other RNA
catgtgggccatgaggtccaccactctgttgctgtagccaa

SEQ ID NO: 4824 - RNA, 41 nt, synthetic construct
  source 1..41: mol_type = other RNA
catgtgggccatgaggtccaccaccctgttgcggtagccaa

SEQ ID NO: 4825 - RNA, 41 nt, synthetic construct
  source 1..41: mol_type = other RNA
ttgatgcagccaaattcgttgtcataccaggaaatgagctt

SEQ ID NO: 4826 - RNA, 41 nt, synthetic construct
  source 1..41: mol_type = other RNA
ggtccaccaccctgttgctgcatccacatccgttgtcatac

SEQ ID NO: 4827 - RNA, 42 nt, synthetic construct
  source 1..42: mol_type = other RNA
ggtccaccaccagagttgttgcagccaaattggttgtcatac

SEQ ID NO: 4828 - RNA, 41 nt, synthetic construct
  source 1..41: mol_type = other RNA
catgtgggccatgaggtccaccacccaggcgctgtagccaa

SEQ ID NO: 4829 - RNA, 41 nt, synthetic construct
  source 1..41: mol_type = other RNA
catgtgggccatgaggtccacaaccctgtggctgtagccaa

SEQ ID NO: 4830 - RNA, 47 nt, synthetic construct
  source 1..47: mol_type = other RNA
ttgctgcagccaggggatctttcgttgtcataccaggaaatgagctt

SEQ ID NO: 4831 - RNA, 41 nt, synthetic construct
  source 1..41: mol_type = other RNA
catgtgggccatgaggtccaccaccctgttgatgtagccaa

SEQ ID NO: 4832 - RNA, 41 nt, synthetic construct
  source 1..41: mol_type = other RNA
ggtccaccacctaattgctgcagccaaattcgttgtcatac

SEQ ID NO: 4833 - RNA, 41 nt, synthetic construct
  source 1..41: mol_type = other RNA
catgtgggccatgaggtccaccaccctattgctgcagccaa

SEQ ID NO: 4834 - RNA, 41 nt, synthetic construct
  source 1..41: mol_type = other RNA
ggtccaccacccaggcgctgcagccaaattcgttgtcatac

SEQ ID NO: 4835 - RNA, 41 nt, synthetic construct
  source 1..41: mol_type = other RNA
catgtgggccatgaggtccaccaccctgttgctgtagcgca

SEQ ID NO: 4836 - RNA, 41 nt, synthetic construct
  source 1..41: mol_type = other RNA
ttgctgcagccaccttcgttgtcataccaggaaatgagctt

SEQ ID NO: 4837 - RNA, 41 nt, synthetic construct
  source 1..41: mol_type = other RNA
catgtgggccatgaggtccaccaccctgttggtgcagccaa

SEQ ID NO: 4838 - RNA, 41 nt, synthetic construct
  source 1..41: mol_type = other RNA
ggtccaccacccagcagctgcagccaaattcgttgtcatac

SEQ ID NO: 4839 - RNA, 41 nt, synthetic construct
  source 1..41: mol_type = other RNA
catgtgggccatgaggtccaccaccctgctggtgcagccag

SEQ ID NO: 4840 - RNA, 41 nt, synthetic construct
  source 1..41: mol_type = other RNA
tagctgcagccaaattcgttgtcataccaggaaatgagctt

SEQ ID NO: 4841 - RNA, 41 nt, synthetic construct
  source 1..41: mol_type = other RNA
ggtccaccaccctgttgctgtagccgaacttgttgtcatac

SEQ ID NO: 4842 - RNA, 41 nt, synthetic construct
  source 1..41: mol_type = other RNA
catgtgggccatgaggtccaccacccaagtgctgtagccaa

SEQ ID NO: 4843 - RNA, 42 nt, synthetic construct
  source 1..42: mol_type = other RNA
ggtccaccacccaagtcgctgcagccaaattcgttgtcatac

SEQ ID NO: 4844 - RNA, 41 nt, synthetic construct
  source 1..41: mol_type = other RNA
ggtccaccactctgttgctgtaaacgaattcgttgtcatac

SEQ ID NO: 4845 - RNA, 43 nt, synthetic construct
  source 1..43: mol_type = other RNA
ggtccaccaccaggggttgttgcagccgaagtcgttgtcatac

SEQ ID NO: 4846 - RNA, 41 nt, synthetic construct
  source 1..41: mol_type = other RNA
ttgctgcagccaactcggttgtcataccaggaaatgagctt

SEQ ID NO: 4847 - RNA, 41 nt, synthetic construct
  source 1..41: mol_type = other RNA
catgtgggccatgaggtccaccaccaagttgctgtagccaa

SEQ ID NO: 4848 - RNA, 41 nt, synthetic construct
  source 1..41: mol_type = other RNA
ggtccaccaccccgttgctgtagcaaaacttgttgtcatac

SEQ ID NO: 4849 - RNA, 52 nt, synthetic construct
  source 1..52: mol_type = other RNA
catgtgggccatgaggtccacgccaaccgcctgattctgtcgctgcagccaa

SEQ ID NO: 4850 - RNA, 41 nt, synthetic construct
  source 1..41: mol_type = other RNA
ggtccaccactctgatgctgtagacaaattcgttgtcatac

SEQ ID NO: 4851 - RNA, 43 nt, synthetic construct
  source 1..43: mol_type = other RNA
catgtgggccatgaggtccaccaccaggggttgttgcagccga

SEQ ID NO: 4852 - RNA, 49 nt, synthetic construct
  source 1..49: mol_type = other RNA
ggtccaccaccgcctgattctgtcgctgcagccaatttcgttgtcatac

SEQ ID NO: 4853 - RNA, 41 nt, synthetic construct
  source 1..41: mol_type = other RNA
catgtgggccatgaggtccaccacactgttgcagcagccac

SEQ ID NO: 4854 - RNA, 41 nt, synthetic construct
  source 1..41: mol_type = other RNA
catgtgggccatgaggtccaaacccctgttgctgcagccaa

SEQ ID NO: 4855 - RNA, 47 nt, synthetic construct
  source 1..47: mol_type = other RNA
ggtccaccaccctgttgctgtagccctaggatctttcgttgtcatac

SEQ ID NO: 4856 - RNA, 41 nt, synthetic construct
  source 1..41: mol_type = other RNA
ttactgcagccaaattcgttgtcataccaggaaatgagctt

SEQ ID NO: 4857 - RNA, 41 nt, synthetic construct
  source 1..41: mol_type = other RNA
ttgctgcagccacgttggttgtcataccaggaaatgagctt

SEQ ID NO: 4858 - RNA, 41 nt, synthetic construct
  source 1..41: mol_type = other RNA
catgtgggccatgaggtccaccaccctgtagctgcagccaa

SEQ ID NO: 4859 - RNA, 41 nt, synthetic construct
  source 1..41: mol_type = other RNA
ggtccaccaccctgttgcggtagccgcattcgttgtcatac

SEQ ID NO: 4860 - RNA, 41 nt, synthetic construct
  source 1..41: mol_type = other RNA
catgtgggccatgaggtccaccacccggttgctgcagccaa

SEQ ID NO: 4861 - RNA, 42 nt, synthetic construct
  source 1..42: mol_type = other RNA
catgtgggccatgaggtccaccaccctagttgctgcagccac

SEQ ID NO: 4862 - RNA, 40 nt, synthetic construct
  source 1..40: mol_type = other RNA
catgtgggccatgaggtccatcaccatgacctgcagccac

SEQ ID NO: 4863 - RNA, 41 nt, synthetic construct
  source 1..41: mol_type = other RNA
ggtccaccaccctgttgttgttaccaccctcgttgtcatac

SEQ ID NO: 4864 - RNA, 41 nt, synthetic construct
  source 1..41: mol_type = other RNA
cccctgtagccaaattcgttgtcataccaggaaatgagctt

SEQ ID NO: 4865 - RNA, 41 nt, synthetic construct
  source 1..41: mol_type = other RNA
catgtgggccatgaggtccaccaccctgttgttgtagccaa

SEQ ID NO: 4866 - RNA, 41 nt, synthetic construct
  source 1..41: mol_type = other RNA
catgtgggccatgaggtccaccaccctgtgactgtagccaa

SEQ ID NO: 4867 - RNA, 47 nt, synthetic construct
  source 1..47: mol_type = other RNA
ggtccaccaccctgttgctgcagccaagtgatctttcgttgtcatac

SEQ ID NO: 4868 - RNA, 41 nt, synthetic construct
  source 1..41: mol_type = other RNA
catgtgggccatgaggtccactaccccgttgctgcagccac

SEQ ID NO: 4869 - RNA, 41 nt, synthetic construct
  source 1..41: mol_type = other RNA
catgtgggccatgaggtccaccaccctgttgctgcagccaa

SEQ ID NO: 4870 - RNA, 41 nt, synthetic construct
  source 1..41: mol_type = other RNA
catgtgggccatgaggtccaccactctgctgctgtagccca

SEQ ID NO: 4871 - RNA, 41 nt, synthetic construct
  source 1..41: mol_type = other RNA
catgtgggccatgaggtccaacaccctgtgggtgtagccaa

SEQ ID NO: 4872 - RNA, 41 nt, synthetic construct
  source 1..41: mol_type = other RNA
catgtgggccatgaggtccaccaccctgttgttgcagccaa

SEQ ID NO: 4873 - RNA, 41 nt, synthetic construct
  source 1..41: mol_type = other RNA
ggtccaccacacatttgctgtagccaaattcgttgtcatac

SEQ ID NO: 4874 - RNA, 41 nt, synthetic construct
  source 1..41: mol_type = other RNA
ttgctgcagccacactcgttgtcataccaggaaatgagctt

SEQ ID NO: 4875 - RNA, 41 nt, synthetic construct
  source 1..41: mol_type = other RNA
catgtgggccatgaggtccaccacccgtgatctgcagccaa

SEQ ID NO: 4876 - RNA, 40 nt, synthetic construct
  source 1..40: mol_type = other RNA
ggtccaccaccctgtgctgtagccaaattcgttgtcatac

SEQ ID NO: 4877 - RNA, 42 nt, synthetic construct
  source 1..42: mol_type = other RNA
ggtccaccacctaattgcaagcagccaaattcgttgtcatac

SEQ ID NO: 4878 - RNA, 41 nt, synthetic construct
  source 1..41: mol_type = other RNA
tgactgtagccaaattcgttgtcataccaggaaatgagctt

SEQ ID NO: 4879 - RNA, 41 nt, synthetic construct
  source 1..41: mol_type = other RNA
catgtgggccatgaggtccaccactctgatgctgtagacaa

SEQ ID NO: 4880 - RNA, 41 nt, synthetic construct
  source 1..41: mol_type = other RNA
catgtgggccatgaggtccaccaccaagttgctgcggccaa

SEQ ID NO: 4881 - RNA, 41 nt, synthetic construct
  source 1..41: mol_type = other RNA
ggtccaccaccctgttgctgtagccagattagttgtcatac

SEQ ID NO: 4882 - RNA, 41 nt, synthetic construct
  source 1..41: mol_type = other RNA
catgtgggccatgaggtccaccaccctgttgctgtagccaa

SEQ ID NO: 4883 - RNA, 41 nt, synthetic construct
  source 1..41: mol_type = other RNA
gcgctgtagccaaattcgttgtcataccaggaaatgagctt

SEQ ID NO: 4884 - RNA, 41 nt, synthetic construct
  source 1..41: mol_type = other RNA
ggtccaccacccagcagctgtagccaaattcgttgtcatac

SEQ ID NO: 4885 - RNA, 40 nt, synthetic construct
  source 1..40: mol_type = other RNA
ggtccaccacctgttggcgcagtcaatcccgttgtcatac

SEQ ID NO: 4886 - RNA, 41 nt, synthetic construct
  source 1..41: mol_type = other RNA
catgtgggccatgaggtccaccaccctgttgatgcagtcaa

SEQ ID NO: 4887 - RNA, 41 nt, synthetic construct
  source 1..41: mol_type = other RNA
catgtgggccatgaggtccaccaccctgtgactgcagccaa

SEQ ID NO: 4888 - RNA, 41 nt, synthetic construct
  source 1..41: mol_type = other RNA
ttgctgcaaacgaattcgttgtcataccaggaaatgagctt

SEQ ID NO: 4889 - RNA, 41 nt, synthetic construct
  source 1..41: mol_type = other RNA
catgtgggccatgaggtccaccacaagctggctgtagccaa

SEQ ID NO: 4890 - RNA, 40 nt, synthetic construct
  source 1..40: mol_type = other RNA
catgtgggccatgaggtccacgccctgtagttgcaaccac

SEQ ID NO: 4891 - RNA, 41 nt, synthetic construct
  source 1..41: mol_type = other RNA
ttgctgcagccaaataagttgtcataccaggaaatgagctt

SEQ ID NO: 4892 - RNA, 41 nt, synthetic construct
  source 1..41: mol_type = other RNA
catgtgggccatgaggtccaccacccagttgctgcagccaa

SEQ ID NO: 4893 - RNA, 42 nt, synthetic construct
  source 1..42: mol_type = other RNA
catgtgggccatgaggtccaccaccctagttgatgtagccaa

SEQ ID NO: 4894 - RNA, 41 nt, synthetic construct
  source 1..41: mol_type = other RNA
ttgctgcagccaaattctttgtcataccaggaaatgagctt

SEQ ID NO: 4895 - RNA, 40 nt, synthetic construct
  source 1..40: mol_type = other RNA
ggtccaccaccatgtcctgcagccaccgtcgttgtcatac

SEQ ID NO: 4896 - RNA, 41 nt, synthetic construct
  source 1..41: mol_type = other RNA
catgtgggccatgaggtccaccaccagcttgctatagccaa

SEQ ID NO: 4897 - RNA, 41 nt, synthetic construct
  source 1..41: mol_type = other RNA
ggtccaccaccctggggatgctgccaaagtcgttgtcatac

SEQ ID NO: 4898 - RNA, 41 nt, synthetic construct
  source 1..41: mol_type = other RNA
catgtgggccatgaggtccaccactctgcccctgtagccaa

SEQ ID NO: 4899 - RNA, 41 nt, synthetic construct
  source 1..41: mol_type = other RNA
catgtgggccatgaggtccaccaccccgacgctgtaaccaa

SEQ ID NO: 4900 - RNA, 41 nt, synthetic construct
  source 1..41: mol_type = other RNA
ttgttgcagccagattcgttgtcataccaggaaatgagctt

SEQ ID NO: 4901 - RNA, 41 nt, synthetic construct
  source 1..41: mol_type = other RNA
catgtgggccatgaggtccaccaccctgttgctgcagccca

SEQ ID NO: 4902 - RNA, 41 nt, synthetic construct
  source 1..41: mol_type = other RNA
catgtgggccatgaggtccaccaccctgcccctgcagccaa

SEQ ID NO: 4903 - RNA, 41 nt, synthetic construct
  source 1..41: mol_type = other RNA
catgtgggccatgaggtccaccacggtgtggctgtagccaa

SEQ ID NO: 4904 - RNA, 41 nt, synthetic construct
  source 1..41: mol_type = other RNA
catgtgggccatgaggtccaccaccctgtagctgtagccct

SEQ ID NO: 4905 - RNA, 41 nt, synthetic construct
  source 1..41: mol_type = other RNA
ttgctgcagccacgttcgttgtcataccaggaaatgagctt

SEQ ID NO: 4906 - RNA, 41 nt, synthetic construct
  source 1..41: mol_type = other RNA
ttgctgcagccagattcgttgtcataccaggaaatgagctt

SEQ ID NO: 4907 - RNA, 41 nt, synthetic construct
  source 1..41: mol_type = other RNA
ttgctgcagcccactttgttgtcataccaggaaatgagctt

SEQ ID NO: 4908 - RNA, 41 nt, synthetic construct
  source 1..41: mol_type = other RNA
catgtgggccatgaggtccaccaccctgttgctgtagctaa

SEQ ID NO: 4909 - RNA, 41 nt, synthetic construct
  source 1..41: mol_type = other RNA
catgtgggccatgaggtccaccaccctattgctgtagccaa

SEQ ID NO: 4910 - RNA, 41 nt, synthetic construct
  source 1..41: mol_type = other RNA
catgtgggccatgaggtccacccccctgtcgctgtagccaa

SEQ ID NO: 4911 - RNA, 45 nt, synthetic construct
  source 1..45: mol_type = other RNA
catgtgggccatgaggtccaccacttgcctgttgttagtagccat

SEQ ID NO: 4912 - RNA, 41 nt, synthetic construct
  source 1..41: mol_type = other RNA
ggtccaccaccccgacgctgtaaccaaattcgttgtcatac

SEQ ID NO: 4913 - RNA, 41 nt, synthetic construct
  source 1..41: mol_type = other RNA
gtgctgcagccaaattaattgtcataccaggaaatgagctt

SEQ ID NO: 4914 - RNA, 41 nt, synthetic construct
  source 1..41: mol_type = other RNA
ttgctgcagccaacctcgttgtcataccaggaaatgagctt

SEQ ID NO: 4915 - RNA, 41 nt, synthetic construct
  source 1..41: mol_type = other RNA
catgtgggccatgaggtccaccacccagttgcagcagccaa

SEQ ID NO: 4916 - RNA, 41 nt, synthetic construct
  source 1..41: mol_type = other RNA
ggtccaccaccctgttaccgtagccaaactcgttgtcatac

SEQ ID NO: 4917 - RNA, 41 nt, synthetic construct
  source 1..41: mol_type = other RNA
catgtgggccatgaggtccaccaccctgtcgctgcagccaa

SEQ ID NO: 4918 - RNA, 41 nt, synthetic construct
  source 1..41: mol_type = other RNA
ggtccaccacccaggcgctgtagccaaattcgttgtcatac

SEQ ID NO: 4919 - RNA, 41 nt, synthetic construct
  source 1..41: mol_type = other RNA
catgtgggccatgaggtccaccaccctgttgcggtagccac

SEQ ID NO: 4920 - RNA, 41 nt, synthetic construct
  source 1..41: mol_type = other RNA
catgtgggccatgaggtccaccaccctgttgatgtagtcaa

SEQ ID NO: 4921 - RNA, 41 nt, synthetic construct
  source 1..41: mol_type = other RNA
catgtgggccatgaggtccaccacccaactgctgtagccaa

SEQ ID NO: 4922 - RNA, 41 nt, synthetic construct
  source 1..41: mol_type = other RNA
catgtgggccatgaggtccaccaccctgttactatagccaa

SEQ ID NO: 4923 - RNA, 41 nt, synthetic construct
  source 1..41: mol_type = other RNA
ggtccaccaccttcttagcgcagccaccggcgttgtcatac

SEQ ID NO: 4924 - RNA, 41 nt, synthetic construct
  source 1..41: mol_type = other RNA
ttgctgtagccaaattcgttttcataccaggaaatgagctt

SEQ ID NO: 4925 - RNA, 41 nt, synthetic construct
  source 1..41: mol_type = other RNA
catgtgggccatgaggtccaccaccagcttgctacagccaa

SEQ ID NO: 4926 - RNA, 41 nt, synthetic construct
  source 1..41: mol_type = other RNA
catgtgggccatgaggtccaacacaacattgctgtaaccaa

SEQ ID NO: 4927 - RNA, 41 nt, synthetic construct
  source 1..41: mol_type = other RNA
acgctgcaaccaaattcgttgtcataccaggaaatgagctt

SEQ ID NO: 4928 - RNA, 40 nt, synthetic construct
  source 1..40: mol_type = other RNA
ggtccaccaccatgacctgcagccaccgtcgttgtcatac

SEQ ID NO: 4929 - RNA, 41 nt, synthetic construct
  source 1..41: mol_type = other RNA
ttgctgcggccaaattcgttatcataccaggaaatgagctt

SEQ ID NO: 4930 - RNA, 41 nt, synthetic construct
  source 1..41: mol_type = other RNA
ttgctgcagccaaattggttgtcataccaggaaatgagctt

SEQ ID NO: 4931 - RNA, 41 nt, synthetic construct
  source 1..41: mol_type = other RNA
catgtgggccatgaggtccaccgcccttttgctgcagcaaa

SEQ ID NO: 4932 - RNA, 41 nt, synthetic construct
  source 1..41: mol_type = other RNA
catgtgggccatgaggtccaccaccctgtagctgcagccct

SEQ ID NO: 4933 - RNA, 41 nt, synthetic construct
  source 1..41: mol_type = other RNA
catgtgggccatgaggtccaccaccctgttgctgcagccta

SEQ ID NO: 4934 - RNA, 41 nt, synthetic construct
  source 1..41: mol_type = other RNA
atgctgcagccaaattcgttgtcataccaggaaatgagctt

SEQ ID NO: 4935 - RNA, 41 nt, synthetic construct
  source 1..41: mol_type = other RNA
catgtgggccatgaggtccaccaccctgttgctgtagccca

SEQ ID NO: 4936 - RNA, 41 nt, synthetic construct
  source 1..41: mol_type = other RNA
catgtgggccatgaggtccaccacccagttgctgtagccaa

SEQ ID NO: 4937 - RNA, 41 nt, synthetic construct
  source 1..41: mol_type = other RNA
ttgctgcagccaaattcgttatcataccaggaaatgagctt

SEQ ID NO: 4938 - RNA, 41 nt, synthetic construct
  source 1..41: mol_type = other RNA
ttgctgcagccaaatgcgttgtcataccaggaaatgagctt

SEQ ID NO: 4939 - RNA, 41 nt, synthetic construct
  source 1..41: mol_type = other RNA
catgtgggccatgaggtccaccaccccgttgctgcagtcca

SEQ ID NO: 4940 - RNA, 41 nt, synthetic construct
  source 1..41: mol_type = other RNA
ggtccaccaccctggggctatagccaaattcgttgtcatac

SEQ ID NO: 4941 - RNA, 41 nt, synthetic construct
  source 1..41: mol_type = other RNA
ttgctgcagccaaatacgttgtcataccaggaaatgagctt

SEQ ID NO: 4942 - RNA, 41 nt, synthetic construct
  source 1..41: mol_type = other RNA
catgtgggccatgaggtccaccaccctgttactacagccaa

SEQ ID NO: 4943 - RNA, 43 nt, synthetic construct
  source 1..43: mol_type = other RNA
ttgctgcagccaatttctttttgtcataccaggaaatgagctt

SEQ ID NO: 4944 - RNA, 41 nt, synthetic construct
  source 1..41: mol_type = other RNA
ggtccaccacaacattgctgtaaccaaattcgttgtcatac

SEQ ID NO: 4945 - RNA, 41 nt, synthetic construct
  source 1..41: mol_type = other RNA
catgtgggccatgaggtccaccaccctggtgctgcagccaa

SEQ ID NO: 4946 - RNA, 41 nt, synthetic construct
  source 1..41: mol_type = other RNA
ggtccaccaccctggggatgttgccaaagtcgttgtcatac

SEQ ID NO: 4947 - RNA, 41 nt, synthetic construct
  source 1..41: mol_type = other RNA
catgtgggccatgaggtccaccaccctgtggctgcagccaa

SEQ ID NO: 4948 - RNA, 41 nt, synthetic construct
  source 1..41: mol_type = other RNA
ggtccaccacccaactgctgcagccaaattcgttgtcatac

SEQ ID NO: 4949 - RNA, 41 nt, synthetic construct
  source 1..41: mol_type = other RNA
ttgctgcagccaaactcgttgtcataccaggaaatgagctt

SEQ ID NO: 4950 - RNA, 42 nt, synthetic construct
  source 1..42: mol_type = other RNA
catgtgggccatgaggtccaatcaccctgttgttgcagccaa

SEQ ID NO: 4951 - RNA, 40 nt, synthetic construct
  source 1..40: mol_type = other RNA
ggtccaccaccctgtgctgcagccaaattcgttgtcatac

SEQ ID NO: 4952 - RNA, 43 nt, synthetic construct
  source 1..43: mol_type = other RNA
catgtgggccatgaggtccatcaccctgttgctgtagccctaa

SEQ ID NO: 4953 - RNA, 41 nt, synthetic construct
  source 1..41: mol_type = other RNA
ttgctgcagccaaattcgttgtcataccaggaaatgagctt

SEQ ID NO: 4954 - RNA, 41 nt, synthetic construct
  source 1..41: mol_type = other RNA
ttgctgcagccaacttcgttgtcataccaggaaatgagctt

SEQ ID NO: 4955 - RNA, 41 nt, synthetic construct
  source 1..41: mol_type = other RNA
ggtccaccacccaactgctgtagccaaattcgttgtcatac

SEQ ID NO: 4956 - RNA, 41 nt, synthetic construct
  source 1..41: mol_type = other RNA
acgctgtaaccaaattcgttgtcataccaggaaatgagctt

SEQ ID NO: 4957 - RNA, 41 nt, synthetic construct
  source 1..41: mol_type = other RNA
tcgctgtaaccaaattcgttgtcataccaggaaatgagctt

SEQ ID NO: 4958 - RNA, 41 nt, synthetic construct
  source 1..41: mol_type = other RNA
catgtgggccatgaggtccaccaccctgttgcggcagccac

SEQ ID NO: 4959 - RNA, 41 nt, synthetic construct
  source 1..41: mol_type = other RNA
ggtccaccaccctgcctctacagccaaattcgttgtcatac

SEQ ID NO: 4960 - RNA, 41 nt, synthetic construct
  source 1..41: mol_type = other RNA
catgtgggccatgaggtccactaccctgttgctgcatccac

SEQ ID NO: 4961 - RNA, 40 nt, synthetic construct
  source 1..40: mol_type = other RNA
tgctgtagccaaattcgttgtcataccaggaaatgagctt

SEQ ID NO: 4962 - RNA, 41 nt, synthetic construct
  source 1..41: mol_type = other RNA
catgtgggccatgaggtccaccaccctgccgctgtagccca

SEQ ID NO: 4963 - RNA, 41 nt, synthetic construct
  source 1..41: mol_type = other RNA
ggtccaccaccctgttactatagccaaatgcgttgtcatac

SEQ ID NO: 4964 - RNA, 41 nt, synthetic construct
  source 1..41: mol_type = other RNA
catgtgggccatgaggtccaccaccctgtcgctgcaagtct

SEQ ID NO: 4965 - RNA, 41 nt, synthetic construct
  source 1..41: mol_type = other RNA
ggtccaccaccctgcctctatagccaaattcgttgtcatac

SEQ ID NO: 4966 - RNA, 41 nt, synthetic construct
  source 1..41: mol_type = other RNA
ggtccaccaccctggggctacagccaaattcgttgtcatac

SEQ ID NO: 4967 - RNA, 41 nt, synthetic construct
  source 1..41: mol_type = other RNA
catgtgggccatgaggtccaccaccctggtgctgtagccaa

SEQ ID NO: 4968 - RNA, 41 nt, synthetic construct
  source 1..41: mol_type = other RNA
ttgctgcagccgaacttgttgtcataccaggaaatgagctt

SEQ ID NO: 4969 - RNA, 41 nt, synthetic construct
  source 1..41: mol_type = other RNA
ggtccaccaccctgttgttgctaccaccctcgttgtcatac

SEQ ID NO: 4970 - RNA, 41 nt, synthetic construct
  source 1..41: mol_type = other RNA
ttgctgtagccaaattcgttgtcataccaggaaatgagctt

SEQ ID NO: 4971 - RNA, 41 nt, synthetic construct
  source 1..41: mol_type = other RNA
ccgctgcagccaaattcgttgtcataccaggaaatgagctt

SEQ ID NO: 4972 - RNA, 41 nt, synthetic construct
  source 1..41: mol_type = other RNA
ttgctgcagccagattagttatcataccaggaaatgagctt

SEQ ID NO: 4973 - RNA, 41 nt, synthetic construct
  source 1..41: mol_type = other RNA
atgctgcagccaaactcgttgtcataccaggaaatgagctt

SEQ ID NO: 4974 - RNA, 41 nt, synthetic construct
  source 1..41: mol_type = other RNA
tagctgtagccaaattcgttgtcataccaggaaatgagctt

SEQ ID NO: 4975 - RNA, 41 nt, synthetic construct
  source 1..41: mol_type = other RNA
ttgctgcagccaaattcgttttcataccaggaaatgagctt

SEQ ID NO: 4976 - RNA, 41 nt, synthetic construct
  source 1..41: mol_type = other RNA
tgactgcagccaaattcgttgtcataccaggaaatgagctt

SEQ ID NO: 4977 - RNA, 41 nt, synthetic construct
  source 1..41: mol_type = other RNA
catgtgggccatgaggtccaccacaaagttgctacagccaa

SEQ ID NO: 4978 - RNA, 41 nt, synthetic construct
  source 1..41: mol_type = other RNA
gtgctgcagccgaattcgttgtcataccaggaaatgagctt

SEQ ID NO: 4979 - RNA, 42 nt, synthetic construct
  source 1..42: mol_type = other RNA
catgtgggccatgaggtccaatcaccctgttgttgtagccaa

SEQ ID NO: 4980 - RNA, 41 nt, synthetic construct
  source 1..41: mol_type = other RNA
ttgttgcagccaaattcgttgtcataccaggaaatgagctt

SEQ ID NO: 4981 - RNA, 41 nt, synthetic construct
  source 1..41: mol_type = other RNA
ttgctgcagtccaattcgttgtcataccaggaaatgagctt

SEQ ID NO: 4982 - RNA, 41 nt, synthetic construct
  source 1..41: mol_type = other RNA
ttgctgcagccgaattcgttgtcataccaggaaatgagctt

SEQ ID NO: 4983 - RNA, 41 nt, synthetic construct
  source 1..41: mol_type = other RNA
tggctgcagccaaattcgttgtcataccaggaaatgagctt

SEQ ID NO: 4984 - RNA, 41 nt, synthetic construct
  source 1..41: mol_type = other RNA
tcgatgtagccaaattcgttgtcataccaggaaatgagctt

SEQ ID NO: 4985 - RNA, 41 nt, synthetic construct
  source 1..41: mol_type = other RNA
ttgctgcagccatattcattgtcataccaggaaatgagctt

SEQ ID NO: 4986 - RNA, 41 nt, synthetic construct
  source 1..41: mol_type = other RNA
catgtgggccatgaggtccaccaccctgtggctgtagccaa

SEQ ID NO: 4987 - RNA, 41 nt, synthetic construct
  source 1..41: mol_type = other RNA
ttgctgcagcaaatttcgttgtcataccaggaaatgagctt

SEQ ID NO: 4988 - RNA, 41 nt, synthetic construct
  source 1..41: mol_type = other RNA
ttgttgcagccaacgtggttgtcataccaggaaatgagctt

SEQ ID NO: 4989 - RNA, 41 nt, synthetic construct
  source 1..41: mol_type = other RNA
catgtgggccatgaggtccaccagcctcttagcgcagccac

SEQ ID NO: 4990 - RNA, 41 nt, synthetic construct
  source 1..41: mol_type = other RNA
tggctgtagccaaattcattgtcataccaggaaatgagctt

SEQ ID NO: 4991 - RNA, 41 nt, synthetic construct
  source 1..41: mol_type = other RNA
ttcctgcagccaaattcgttgtcataccaggaaatgagctt

SEQ ID NO: 4992 - RNA, 41 nt, synthetic construct
  source 1..41: mol_type = other RNA
ggtccaccactctgcccctgtagccgaattcgttgtcatac

SEQ ID NO: 4993 - RNA, 41 nt, synthetic construct
  source 1..41: mol_type = other RNA
ggtccaccacaaagttgctacagccgaatttgttgtcatac

SEQ ID NO: 4994 - RNA, 41 nt, synthetic construct
  source 1..41: mol_type = other RNA
tcgctgcagccaaattcgttgtcataccaggaaatgagctt

SEQ ID NO: 4995 - RNA, 41 nt, synthetic construct
  source 1..41: mol_type = other RNA
ttgctgtagctaaattcgttgtcataccaggaaatgagctt

SEQ ID NO: 4996 - RNA, 41 nt, synthetic construct
  source 1..41: mol_type = other RNA
ttactgcagccaaattccttgtcataccaggaaatgagctt

SEQ ID NO: 4997 - RNA, 42 nt, synthetic construct
  source 1..42: mol_type = other RNA
catgtgggccatgaggtccaccacccaattgcaagtagccaa

SEQ ID NO: 4998 - RNA, 41 nt, synthetic construct
  source 1..41: mol_type = other RNA
catgtgggccatgaggtccaccaccctgcctctacagccaa

SEQ ID NO: 4999 - RNA, 39 nt, synthetic construct
  source 1..39: mol_type = other RNA
ggtccaccaccctgtttgcagctagatttgttgtcatac

SEQ ID NO: 5000 - RNA, 41 nt, synthetic construct
  source 1..41: mol_type = other RNA
catgtgggccatgaggtccaccactctgttgctgcaaacaa

SEQ ID NO: 5001 - RNA, 41 nt, synthetic construct
  source 1..41: mol_type = other RNA
ttgctgtagccaaatgcgttgtcataccaggaaatgagctt

SEQ ID NO: 5002 - RNA, 41 nt, synthetic construct
  source 1..41: mol_type = other RNA
ttgctgcagccaaattcggcgtcataccaggaaatgagctt

SEQ ID NO: 5003 - RNA, 41 nt, synthetic construct
  source 1..41: mol_type = other RNA
ggtccaccaccctgcggctgctgccacattagttgtcatac

SEQ ID NO: 5004 - RNA, 41 nt, synthetic construct
  source 1..41: mol_type = other RNA
atgctgtagccaaattcgttgtcataccaggaaatgagctt

SEQ ID NO: 5005 - RNA, 41 nt, synthetic construct
  source 1..41: mol_type = other RNA
ctgctgtagccaaattcgttgtcataccaggaaatgagctt

SEQ ID NO: 5006 - RNA, 41 nt, synthetic construct
  source 1..41: mol_type = other RNA
ttgctgtaaccaaattcgttgtcataccaggaaatgagctt

SEQ ID NO: 5007 - RNA, 41 nt, synthetic construct
  source 1..41: mol_type = other RNA
ttgcggcagccgcattcgttgtcataccaggaaatgagctt

SEQ ID NO: 5008 - RNA, 41 nt, synthetic construct
  source 1..41: mol_type = other RNA
gtgctgcagccaaatcaagtgtcataccaggaaatgagctt

SEQ ID NO: 5009 - RNA, 42 nt, synthetic construct
  source 1..42: mol_type = other RNA
ctgctgcagccacattcgtatgtcataccaggaaatgagctt

SEQ ID NO: 5010 - RNA, 41 nt, synthetic construct
  source 1..41: mol_type = other RNA
ggtccaccaccctgttactacagccaaatgcgttgtcatac

SEQ ID NO: 5011 - RNA, 41 nt, synthetic construct
  source 1..41: mol_type = other RNA
ctgctgcagccaaattcgttgtcataccaggaaatgagctt

SEQ ID NO: 5012 - RNA, 41 nt, synthetic construct
  source 1..41: mol_type = other RNA
ttgctgtagccaaattctttgtcataccaggaaatgagctt

SEQ ID NO: 5013 - RNA, 41 nt, synthetic construct
  source 1..41: mol_type = other RNA
cccctgcagccaaattcgttgtcataccaggaaatgagctt

SEQ ID NO: 5014 - RNA, 41 nt, synthetic construct
  source 1..41: mol_type = other RNA
ttgctgcagcgcaattcgttgtcataccaggaaatgagctt

SEQ ID NO: 5015 - RNA, 41 nt, synthetic construct
  source 1..41: mol_type = other RNA
gggctatagccaaattcgttgtcataccaggaaatgagctt

SEQ ID NO: 5016 - RNA, 41 nt, synthetic construct
  source 1..41: mol_type = other RNA
ttgctgtagccaaattggttgtcataccaggaaatgagctt

SEQ ID NO: 5017 - RNA, 41 nt, synthetic construct
  source 1..41: mol_type = other RNA
ttggtgcagccaaattcgttgtcataccaggaaatgagctt

SEQ ID NO: 5018 - RNA, 41 nt, synthetic construct
  source 1..41: mol_type = other RNA
catgtgggccatgaggtccaacaccctggggatgttgccaa

SEQ ID NO: 5019 - RNA, 41 nt, synthetic construct
  source 1..41: mol_type = other RNA
ttgctgtagccgaattcgttgtcataccaggaaatgagctt

SEQ ID NO: 5020 - RNA, 41 nt, synthetic construct
  source 1..41: mol_type = other RNA
catgtgggccatgaggtccaccaccctgccgctgcagccca

SEQ ID NO: 5021 - RNA, 41 nt, synthetic construct
  source 1..41: mol_type = other RNA
ttcctgtagccaaattcgttgtcataccaggaaatgagctt

SEQ ID NO: 5022 - RNA, 41 nt, synthetic construct
  source 1..41: mol_type = other RNA
ttgctgcagcaaaacttgttgtcataccaggaaatgagctt

SEQ ID NO: 5023 - RNA, 41 nt, synthetic construct
  source 1..41: mol_type = other RNA
ttgctgtagccaaactcgttgtcataccaggaaatgagctt

SEQ ID NO: 5024 - RNA, 37 nt, synthetic construct
  source 1..37: mol_type = other RNA
ggtccaccaccttgtagctgtagccctgttgtcatac

SEQ ID NO: 5025 - RNA, 41 nt, synthetic construct
  source 1..41: mol_type = other RNA
catgtgggccatgaggtccaccacccggttgctgctgccaa

SEQ ID NO: 5026 - RNA, 41 nt, synthetic construct
  source 1..41: mol_type = other RNA
catgtgggccatgaggtccaccacaaagttgctatagccaa

SEQ ID NO: 5027 - RNA, 41 nt, synthetic construct
  source 1..41: mol_type = other RNA
ttgctgcagccaaattcgtagtcataccaggaaatgagctt

SEQ ID NO: 5028 - RNA, 41 nt, synthetic construct
  source 1..41: mol_type = other RNA
tcgatgcagccaaattcgttgtcataccaggaaatgagctt

SEQ ID NO: 5029 - RNA, 41 nt, synthetic construct
  source 1..41: mol_type = other RNA
ttgctgtagccaaattcgttatcataccaggaaatgagctt

SEQ ID NO: 5030 - RNA, 41 nt, synthetic construct
  source 1..41: mol_type = other RNA
ttgctgtagccagattcgttgtcataccaggaaatgagctt

SEQ ID NO: 5031 - RNA, 41 nt, synthetic construct
  source 1..41: mol_type = other RNA
atgctgtagacaaattcgttgtcataccaggaaatgagctt

SEQ ID NO: 5032 - RNA, 41 nt, synthetic construct
  source 1..41: mol_type = other RNA
catgtgggccatgaggtccacaacccagcagctgtagccaa

SEQ ID NO: 5033 - RNA, 41 nt, synthetic construct
  source 1..41: mol_type = other RNA
ttgttgcagccaaacccgctgtcataccaggaaatgagctt

SEQ ID NO: 5034 - RNA, 41 nt, synthetic construct
  source 1..41: mol_type = other RNA
catgtgggccatgaggtccaccaccctgttgttgctaccac

SEQ ID NO: 5035 - RNA, 41 nt, synthetic construct
  source 1..41: mol_type = other RNA
ttgctgctgccaaattcgttgtcataccaggaaatgagctt

SEQ ID NO: 5036 - RNA, 41 nt, synthetic construct
  source 1..41: mol_type = other RNA
ccgctgcagcccaattcgttgtcataccaggaaatgagctt

SEQ ID NO: 5037 - RNA, 41 nt, synthetic construct
  source 1..41: mol_type = other RNA
gcgctgcagccaaattcgttgtcataccaggaaatgagctt

SEQ ID NO: 5038 - RNA, 41 nt, synthetic construct
  source 1..41: mol_type = other RNA
ttgctgcagccagattcgttatcataccaggaaatgagctt

SEQ ID NO: 5039 - RNA, 41 nt, synthetic construct
  source 1..41: mol_type = other RNA
tcgctgcagccaaattctttgtcataccaggaaatgagctt

SEQ ID NO: 5040 - RNA, 41 nt, synthetic construct
  source 1..41: mol_type = other RNA
ttgttgcagccaatttggttgtcataccaggaaatgagctt

SEQ ID NO: 5041 - RNA, 41 nt, synthetic construct
  source 1..41: mol_type = other RNA
ttgatgcagtcaaattcgttgtcataccaggaaatgagctt

SEQ ID NO: 5042 - RNA, 41 nt, synthetic construct
  source 1..41: mol_type = other RNA
ccgctgtagccaaattcgttgtcataccaggaaatgagctt

SEQ ID NO: 5043 - RNA, 41 nt, synthetic construct
  source 1..41: mol_type = other RNA
catgtgggccatgaggtccacctccctgctcctgcggccaa

SEQ ID NO: 5044 - RNA, 41 nt, synthetic construct
  source 1..41: mol_type = other RNA
catgtgggccatgaggtccaccaccctggggctacagccaa

SEQ ID NO: 5045 - RNA, 41 nt, synthetic construct
  source 1..41: mol_type = other RNA
ggtccaccaccagcttgctacagccaaattcgttgtcatac

SEQ ID NO: 5046 - RNA, 41 nt, synthetic construct
  source 1..41: mol_type = other RNA
ttgctgtaaccgaattcgttgtcataccaggaaatgagctt

SEQ ID NO: 5047 - RNA, 41 nt, synthetic construct
  source 1..41: mol_type = other RNA
ttgcggcagccaaattcgttgtcataccaggaaatgagctt

SEQ ID NO: 5048 - RNA, 41 nt, synthetic construct
  source 1..41: mol_type = other RNA
catgtgggccatgaggtccaccgccctgttgctgcggcaaa

SEQ ID NO: 5049 - RNA, 41 nt, synthetic construct
  source 1..41: mol_type = other RNA
ttgttgcagccaaattggttgtcataccaggaaatgagctt

SEQ ID NO: 5050 - RNA, 40 nt, synthetic construct
  source 1..40: mol_type = other RNA
ggtccaccactcaattgcggtagccaggttgttgtcatac

SEQ ID NO: 5051 - RNA, 40 nt, synthetic construct
  source 1..40: mol_type = other RNA
tcctgcagccaccgtcgttgtcataccaggaaatgagctt

SEQ ID NO: 5052 - RNA, 41 nt, synthetic construct
  source 1..41: mol_type = other RNA
ttgctgtagccaaataagttgtcataccaggaaatgagctt

SEQ ID NO: 5053 - RNA, 41 nt, synthetic construct
  source 1..41: mol_type = other RNA
ttgttgtagccaagttcgttgtcataccaggaaatgagctt

SEQ ID NO: 5054 - RNA, 41 nt, synthetic construct
  source 1..41: mol_type = other RNA
catgtgggccatgaggtccaccaccccgttgctgcagccac

SEQ ID NO: 5055 - RNA, 41 nt, synthetic construct
  source 1..41: mol_type = other RNA
tggctgtagccagattcgttgtcataccaggaaatgagctt

SEQ ID NO: 5056 - RNA, 41 nt, synthetic construct
  source 1..41: mol_type = other RNA
ttgatgtagtcaaattcgttgtcataccaggaaatgagctt

SEQ ID NO: 5057 - RNA, 41 nt, synthetic construct
  source 1..41: mol_type = other RNA
catgtgggccatgaggtccaccaccctgtcgctgtaagtct

SEQ ID NO: 5058 - RNA, 41 nt, synthetic construct
  source 1..41: mol_type = other RNA
ttgctgtagccaaattcgtagtcataccaggaaatgagctt

SEQ ID NO: 5059 - RNA, 41 nt, synthetic construct
  source 1..41: mol_type = other RNA
tggctgcagccaaattcattgtcataccaggaaatgagctt

SEQ ID NO: 5060 - RNA, 41 nt, synthetic construct
  source 1..41: mol_type = other RNA
catgtgggccatgaggtccaccaccctgcctctatagccaa

SEQ ID NO: 5061 - RNA, 41 nt, synthetic construct
  source 1..41: mol_type = other RNA
ttgctgtagccacgttggttgtcataccaggaaatgagctt

SEQ ID NO: 5062 - RNA, 44 nt, synthetic construct
  source 1..44: mol_type = other RNA
catgtgggccatgaggtccaccaccactgaccagctatagccaa

SEQ ID NO: 5063 - RNA, 41 nt, synthetic construct
  source 1..41: mol_type = other RNA
ttgctgtggccaaattcgttatcataccaggaaatgagctt

SEQ ID NO: 5064 - RNA, 41 nt, synthetic construct
  source 1..41: mol_type = other RNA
ttgttgcagccaagttcgttgtcataccaggaaatgagctt

SEQ ID NO: 5065 - RNA, 41 nt, synthetic construct
  source 1..41: mol_type = other RNA
ttgctgtagccaaattcggcgtcataccaggaaatgagctt

SEQ ID NO: 5066 - RNA, 41 nt, synthetic construct
  source 1..41: mol_type = other RNA
tcgctgcagccaaattcgatgtcataccaggaaatgagctt

SEQ ID NO: 5067 - RNA, 41 nt, synthetic construct
  source 1..41: mol_type = other RNA
catgtgggccatgaggtccaccaccccgttgctgcagcaaa

SEQ ID NO: 5068 - RNA, 41 nt, synthetic construct
  source 1..41: mol_type = other RNA
ttaccgtagccaaactcgttgtcataccaggaaatgagctt

SEQ ID NO: 5069 - RNA, 41 nt, synthetic construct
  source 1..41: mol_type = other RNA
ttgttgaagccagattcgttgtcataccaggaaatgagctt

SEQ ID NO: 5070 - RNA, 37 nt, synthetic construct
  source 1..37: mol_type = other RNA
tagctgcagccctgttgtcataccaggaaatgagctt

SEQ ID NO: 5071 - RNA, 41 nt, synthetic construct
  source 1..41: mol_type = other RNA
tcgctgtagccaaattcgatgtcataccaggaaatgagctt

SEQ ID NO: 5072 - RNA, 42 nt, synthetic construct
  source 1..42: mol_type = other RNA
ggtccaccacctaattgcaagtagccaaattcgttgtcatac

SEQ ID NO: 5073 - RNA, 41 nt, synthetic construct
  source 1..41: mol_type = other RNA
acaaggcagccaaattcgtcgtcataccaggaaatgagctt

SEQ ID NO: 5074 - RNA, 41 nt, synthetic construct
  source 1..41: mol_type = other RNA
ggtccaccaccctgttgctgtggtaaatttcgttgtcatac

SEQ ID NO: 5075 - RNA, 41 nt, synthetic construct
  source 1..41: mol_type = other RNA
cccctgcagccgaattcgttgtcataccaggaaatgagctt

SEQ ID NO: 5076 - RNA, 41 nt, synthetic construct
  source 1..41: mol_type = other RNA
ttgcggcagccaggttgttggtcataccaggaaatgagctt

SEQ ID NO: 5077 - RNA, 43 nt, synthetic construct
  source 1..43: mol_type = other RNA
tcgctgcagccaatttctttttgtcataccaggaaatgagctt

SEQ ID NO: 5078 - RNA, 41 nt, synthetic construct
  source 1..41: mol_type = other RNA
ccgctgtagcccaattcgttgtcataccaggaaatgagctt

SEQ ID NO: 5079 - RNA, 41 nt, synthetic construct
  source 1..41: mol_type = other RNA
ttgatgtagccaaattcgttgtcataccaggaaatgagctt

SEQ ID NO: 5080 - RNA, 41 nt, synthetic construct
  source 1..41: mol_type = other RNA
catgtgggccatgaggtccaccaccctgttgttgaagccaa

SEQ ID NO: 5081 - RNA, 41 nt, synthetic construct
  source 1..41: mol_type = other RNA
ttgctgtagccaccttcgttgtcataccaggaaatgagctt

SEQ ID NO: 5082 - RNA, 41 nt, synthetic construct
  source 1..41: mol_type = other RNA
tggctgtagccaaattcgttgtcataccaggaaatgagctt

SEQ ID NO: 5083 - RNA, 41 nt, synthetic construct
  source 1..41: mol_type = other RNA
ttgatgtagccgaattcgttgtcataccaggaaatgagctt

SEQ ID NO: 5084 - RNA, 41 nt, synthetic construct
  source 1..41: mol_type = other RNA
tgactgcagccaatggcgttgtcataccaggaaatgagctt

SEQ ID NO: 5085 - RNA, 41 nt, synthetic construct
  source 1..41: mol_type = other RNA
ttgctgtagcgcaattcgttgtcataccaggaaatgagctt

SEQ ID NO: 5086 - RNA, 41 nt, synthetic construct
  source 1..41: mol_type = other RNA
ttgcggtagccaaattcgttgtcataccaggaaatgagctt

SEQ ID NO: 5087 - RNA, 41 nt, synthetic construct
  source 1..41: mol_type = other RNA
ttgctgtagccagattcgttatcataccaggaaatgagctt

SEQ ID NO: 5088 - RNA, 41 nt, synthetic construct
  source 1..41: mol_type = other RNA
cagctgcagccaaattcgttgtcataccaggaaatgagctt

SEQ ID NO: 5089 - RNA, 37 nt, synthetic construct
  source 1..37: mol_type = other RNA
ttgctgtagccctgttgtcataccaggaaatgagctt

SEQ ID NO: 5090 - RNA, 41 nt, synthetic construct
  source 1..41: mol_type = other RNA
ttgatgcagccaaattcgttatcataccaggaaatgagctt

SEQ ID NO: 5091 - RNA, 41 nt, synthetic construct
  source 1..41: mol_type = other RNA
ttgctgtaaacgaattcgttgtcataccaggaaatgagctt

SEQ ID NO: 5092 - RNA, 41 nt, synthetic construct
  source 1..41: mol_type = other RNA
ggtccaccaccctgttgctgcggtaaatttcgttgtcatac

SEQ ID NO: 5093 - RNA, 41 nt, synthetic construct
  source 1..41: mol_type = other RNA
gtgctgtagccaaattaattgtcataccaggaaatgagctt

SEQ ID NO: 5094 - RNA, 39 nt, synthetic construct
  source 1..39: mol_type = other RNA
tttgcagctagatttgttgtcataccaggaaatgagctt

SEQ ID NO: 5095 - RNA, 41 nt, synthetic construct
  source 1..41: mol_type = other RNA
tcgctgtagccaaattctttgtcataccaggaaatgagctt

SEQ ID NO: 5096 - RNA, 41 nt, synthetic construct
  source 1..41: mol_type = other RNA
ctgctgcagcccaattcggtgtcataccaggaaatgagctt

SEQ ID NO: 5097 - RNA, 41 nt, synthetic construct
  source 1..41: mol_type = other RNA
ggtccaccaccagcttgctatagccaaattcgttgtcatac

SEQ ID NO: 5098 - RNA, 47 nt, synthetic construct
  source 1..47: mol_type = other RNA
ttgctgtagccctaggatctttcgttgtcataccaggaaatgagctt

SEQ ID NO: 5099 - RNA, 41 nt, synthetic construct
  source 1..41: mol_type = other RNA
tggctgcagccagattcgttgtcataccaggaaatgagctt

SEQ ID NO: 5100 - RNA, 41 nt, synthetic construct
  source 1..41: mol_type = other RNA
gggctacagccaaattcgttgtcataccaggaaatgagctt

SEQ ID NO: 5101 - RNA, 41 nt, synthetic construct
  source 1..41: mol_type = other RNA
ttgctgtaaccaaattcgtggtcataccaggaaatgagctt

SEQ ID NO: 5102 - RNA, 41 nt, synthetic construct
  source 1..41: mol_type = other RNA
acaaggtagccaaattcgtcgtcataccaggaaatgagctt

SEQ ID NO: 5103 - RNA, 41 nt, synthetic construct
  source 1..41: mol_type = other RNA
ttgcagcagccacattcgttgtcataccaggaaatgagctt

SEQ ID NO: 5104 - RNA, 41 nt, synthetic construct
  source 1..41: mol_type = other RNA
ttggtgcagccaaaatcgttgtcataccaggaaatgagctt

SEQ ID NO: 5105 - RNA, 42 nt, synthetic construct
  source 1..42: mol_type = other RNA
ggtccaccacccgcattgctacagccaaatcggttgtcatac

SEQ ID NO: 5106 - RNA, 41 nt, synthetic construct
  source 1..41: mol_type = other RNA
tatctgcagccaaattcgttgtcataccaggaaatgagctt

SEQ ID NO: 5107 - RNA, 41 nt, synthetic construct
  source 1..41: mol_type = other RNA
cggctgcagccacatacgttgtcataccaggaaatgagctt

SEQ ID NO: 5108 - RNA, 41 nt, synthetic construct
  source 1..41: mol_type = other RNA
ttgatgcagccgaattcgttgtcataccaggaaatgagctt

SEQ ID NO: 5109 - RNA, 40 nt, synthetic construct
  source 1..40: mol_type = other RNA
catgtgggccatgaggtccaacaccctttgttgtacccaa

SEQ ID NO: 5110 - RNA, 41 nt, synthetic construct
  source 1..41: mol_type = other RNA
cccctgtagccgaattcgttgtcataccaggaaatgagctt

SEQ ID NO: 5111 - RNA, 41 nt, synthetic construct
  source 1..41: mol_type = other RNA
catgtgggccatgaggtccaccaccaagttgctgtggccaa

SEQ ID NO: 5112 - RNA, 41 nt, synthetic construct
  source 1..41: mol_type = other RNA
ttgctatagccgaatttgttgtcataccaggaaatgagctt

SEQ ID NO: 5113 - RNA, 42 nt, synthetic construct
  source 1..42: mol_type = other RNA
ttgcaagcagccaaattccttgtcataccaggaaatgagctt

SEQ ID NO: 5114 - RNA, 41 nt, synthetic construct
  source 1..41: mol_type = other RNA
catgtgggccatgaggtccaccacccgaacaaggtagccaa

SEQ ID NO: 5115 - RNA, 41 nt, synthetic construct
  source 1..41: mol_type = other RNA
atgctgcagacaaattcgttgtcataccaggaaatgagctt

SEQ ID NO: 5116 - RNA, 41 nt, synthetic construct
  source 1..41: mol_type = other RNA
ttgctgcatccacatccgttgtcataccaggaaatgagctt

SEQ ID NO: 5117 - RNA, 41 nt, synthetic construct
  source 1..41: mol_type = other RNA
ttactacagccaaatgcgttgtcataccaggaaatgagctt

SEQ ID NO: 5118 - RNA, 41 nt, synthetic construct
  source 1..41: mol_type = other RNA
ttactgtagccaaattccttgtcataccaggaaatgagctt

SEQ ID NO: 5119 - RNA, 41 nt, synthetic construct
  source 1..41: mol_type = other RNA
ggtccaccaccaagttgctgtggccaaattcgttgtcatac

SEQ ID NO: 5120 - RNA, 41 nt, synthetic construct
  source 1..41: mol_type = other RNA
ctgctgtagcccaattcggtgtcataccaggaaatgagctt

SEQ ID NO: 5121 - RNA, 41 nt, synthetic construct
  source 1..41: mol_type = other RNA
ttgctgtggtaaatttcgttgtcataccaggaaatgagctt

SEQ ID NO: 5122 - RNA, 41 nt, synthetic construct
  source 1..41: mol_type = other RNA
ttgctgtagccgaacttgttgtcataccaggaaatgagctt

SEQ ID NO: 5123 - RNA, 37 nt, synthetic construct
  source 1..37: mol_type = other RNA
tagctgtagccctgttgtcataccaggaaatgagctt

SEQ ID NO: 5124 - RNA, 41 nt, synthetic construct
  source 1..41: mol_type = other RNA
cagctgtagccaaattcgttgtcataccaggaaatgagctt

SEQ ID NO: 5125 - RNA, 41 nt, synthetic construct
  source 1..41: mol_type = other RNA
ttgctgtagcccactttgttgtcataccaggaaatgagctt

SEQ ID NO: 5126 - RNA, 41 nt, synthetic construct
  source 1..41: mol_type = other RNA
ttgttgcagccgaagtcgttctcataccaggaaatgagctt

SEQ ID NO: 5127 - RNA, 41 nt, synthetic construct
  source 1..41: mol_type = other RNA
ggtccaccacccggttgctgctgccaaattcgttgtcatac

SEQ ID NO: 5128 - RNA, 39 nt, synthetic construct
  source 1..39: mol_type = other RNA
ttgctgtaacctaaattcttcataccaggaaatgagctt

SEQ ID NO: 5129 - RNA, 41 nt, synthetic construct
  source 1..41: mol_type = other RNA
ggtccaccacaaagttgctatagccgaatttgttgtcatac

SEQ ID NO: 5130 - RNA, 40 nt, synthetic construct
  source 1..40: mol_type = other RNA
tgctatagccaaattcgtagtcataccaggaaatgagctt

SEQ ID NO: 5131 - RNA, 39 nt, synthetic construct
  source 1..39: mol_type = other RNA
ggtccaccaccctgtttgtagctagatttgttgtcatac

SEQ ID NO: 5132 - RNA, 42 nt, synthetic construct
  source 1..42: mol_type = other RNA
ttgatgcagccaagttggtatgtcataccaggaaatgagctt

SEQ ID NO: 5133 - RNA, 41 nt, synthetic construct
  source 1..41: mol_type = other RNA
ttaccgcagccaaactcgttgtcataccaggaaatgagctt

SEQ ID NO: 5134 - RNA, 41 nt, synthetic construct
  source 1..41: mol_type = other RNA
taactgcagccaacggcgttatcataccaggaaatgagctt

SEQ ID NO: 5135 - RNA, 41 nt, synthetic construct
  source 1..41: mol_type = other RNA
tggctgcagccaaattcatcgtcataccaggaaatgagctt

SEQ ID NO: 5136 - RNA, 41 nt, synthetic construct
  source 1..41: mol_type = other RNA
ttggtgcagccgaaatcgttatcataccaggaaatgagctt

SEQ ID NO: 5137 - RNA, 41 nt, synthetic construct
  source 1..41: mol_type = other RNA
gtgctgtagccaaatcaagtgtcataccaggaaatgagctt

SEQ ID NO: 5138 - RNA, 41 nt, synthetic construct
  source 1..41: mol_type = other RNA
gggatgttgccaaagtcgttgtcataccaggaaatgagctt

SEQ ID NO: 5139 - RNA, 41 nt, synthetic construct
  source 1..41: mol_type = other RNA
tggctgtagccaaattcatcgtcataccaggaaatgagctt

SEQ ID NO: 5140 - RNA, 42 nt, synthetic construct
  source 1..42: mol_type = other RNA
catgtgggccatgaggtccaccagcctcttagcgccagccac

SEQ ID NO: 5141 - RNA, 49 nt, synthetic construct
  source 1..49: mol_type = other RNA
ggtccaccaccgcctgattctgtcgctgtagccaatttcgttgtcatac

SEQ ID NO: 5142 - RNA, 43 nt, synthetic construct
  source 1..43: mol_type = other RNA
ttgctgtagccaatttctttttgtcataccaggaaatgagctt

SEQ ID NO: 5143 - RNA, 43 nt, synthetic construct
  source 1..43: mol_type = other RNA
tcgctgtagccaatttctttttgtcataccaggaaatgagctt

SEQ ID NO: 5144 - RNA, 41 nt, synthetic construct
  source 1..41: mol_type = other RNA
ttgcggtagccgcattcgttgtcataccaggaaatgagctt

SEQ ID NO: 5145 - RNA, 38 nt, synthetic construct
  source 1..38: mol_type = other RNA
ggtccaccaccttgtcgctgcaagtctcgttgtcatac

SEQ ID NO: 5146 - RNA, 41 nt, synthetic construct
  source 1..41: mol_type = other RNA
ttgctacagccgaatttgttgtcataccaggaaatgagctt

SEQ ID NO: 5147 - RNA, 41 nt, synthetic construct
  source 1..41: mol_type = other RNA
ttgatgtagccaaattcgttatcataccaggaaatgagctt

SEQ ID NO: 5148 - RNA, 41 nt, synthetic construct
  source 1..41: mol_type = other RNA
catgtgggccatgaggtccaccaccgcattgctacagccaa

SEQ ID NO: 5149 - RNA, 40 nt, synthetic construct
  source 1..40: mol_type = other RNA
acctgcagccaccgtcgtagtcataccaggaaatgagctt

SEQ ID NO: 5150 - RNA, 41 nt, synthetic construct
  source 1..41: mol_type = other RNA
gggatgctgccaaagtcgttgtcataccaggaaatgagctt

SEQ ID NO: 5151 - RNA, 41 nt, synthetic construct
  source 1..41: mol_type = other RNA
ttgcagcagccgaattcgtcgtcataccaggaaatgagctt

SEQ ID NO: 5152 - RNA, 41 nt, synthetic construct
  source 1..41: mol_type = other RNA
ggtccaccaccctgctcctgcggccaaatttgttgtcatac

SEQ ID NO: 5153 - RNA, 38 nt, synthetic construct
  source 1..38: mol_type = other RNA
tcgctgcaagtctcgttgtcataccaggaaatgagctt

SEQ ID NO: 5154 - RNA, 52 nt, synthetic construct
  source 1..52: mol_type = other RNA
catgtgggccatgaggtccacgccaaccgcctgattctgtcgctgtagccaa

SEQ ID NO: 5155 - RNA, 41 nt, synthetic construct
  source 1..41: mol_type = other RNA
ttgttgttaccaccctcgttgtcataccaggaaatgagctt

SEQ ID NO: 5156 - RNA, 41 nt, synthetic construct
  source 1..41: mol_type = other RNA
ttactatagccaaatgcgttgtcataccaggaaatgagctt

SEQ ID NO: 5157 - RNA, 38 nt, synthetic construct
  source 1..38: mol_type = other RNA
ggtccaccaccttgtcgctgtaagtctcgttgtcatac

SEQ ID NO: 5158 - RNA, 42 nt, synthetic construct
  source 1..42: mol_type = other RNA
ttgcaagtagccaaattccttgtcataccaggaaatgagctt

SEQ ID NO: 5159 - RNA, 41 nt, synthetic construct
  source 1..41: mol_type = other RNA
tagttgcaaccacatccgttgtcataccaggaaatgagctt

SEQ ID NO: 5160 - RNA, 41 nt, synthetic construct
  source 1..41: mol_type = other RNA
catgtgggccatgaggtccacctccctgctcctgtggccaa

SEQ ID NO: 5161 - RNA, 42 nt, synthetic construct
  source 1..42: mol_type = other RNA
tgatctgcagccaaatcaagtgtcataccaggaaatgagctt

SEQ ID NO: 5162 - RNA, 41 nt, synthetic construct
  source 1..41: mol_type = other RNA
catgtgggccatgaggtccaacaccctggggatgctgccaa

SEQ ID NO: 5163 - RNA, 41 nt, synthetic construct
  source 1..41: mol_type = other RNA
ttgttgctaccaccctcgttgtcataccaggaaatgagctt

SEQ ID NO: 5164 - RNA, 41 nt, synthetic construct
  source 1..41: mol_type = other RNA
ttgctgtagcaaaacttgttgtcataccaggaaatgagctt

SEQ ID NO: 5165 - RNA, 41 nt, synthetic construct
  source 1..41: mol_type = other RNA
cctctacagccaaattcggagtcataccaggaaatgagctt

SEQ ID NO: 5166 - RNA, 41 nt, synthetic construct
  source 1..41: mol_type = other RNA
ttgctacagccaaatcggttgtcataccaggaaatgagctt

SEQ ID NO: 5167 - RNA, 41 nt, synthetic construct
  source 1..41: mol_type = other RNA
ttgctgtagccagattagttttcataccaggaaatgagctt

SEQ ID NO: 5168 - RNA, 41 nt, synthetic construct
  source 1..41: mol_type = other RNA
catgtgggccatgaggtccaacgccctgcggctgctgccac

SEQ ID NO: 5169 - RNA, 41 nt, synthetic construct
  source 1..41: mol_type = other RNA
ggtccaccacccgaacaaggcagccaaattcgttgtcatac

SEQ ID NO: 5170 - RNA, 41 nt, synthetic construct
  source 1..41: mol_type = other RNA
ggtccaccaccctgctcctgtggccaaatttgttgtcatac

SEQ ID NO: 5171 - RNA, 40 nt, synthetic construct
  source 1..40: mol_type = other RNA
tgctacagccaaattcgtagtcataccaggaaatgagctt

SEQ ID NO: 5172 - RNA, 41 nt, synthetic construct
  source 1..41: mol_type = other RNA
tgggtgcagccaaattcattgtcataccaggaaatgagctt

SEQ ID NO: 5173 - RNA, 40 nt, synthetic construct
  source 1..40: mol_type = other RNA
catgtgggccatgaggtccaacaccctttgttgcacccaa

SEQ ID NO: 5174 - RNA, 43 nt, synthetic construct
  source 1..43: mol_type = other RNA
catgtgggccatgaggtccacacccatgggtgcttcgggccaa

SEQ ID NO: 5175 - RNA, 38 nt, synthetic construct
  source 1..38: mol_type = other RNA
tcgctgtaagtctcgttgtcataccaggaaatgagctt

SEQ ID NO: 5176 - RNA, 44 nt, synthetic construct
  source 1..44: mol_type = other RNA
ggtccaccaccactgaccagctatagccaagttagttgtcatac

SEQ ID NO: 5177 - RNA, 41 nt, synthetic construct
  source 1..41: mol_type = other RNA
ggtccaccaccaagttgctgcggccaaattcgttgtcatac

SEQ ID NO: 5178 - RNA, 41 nt, synthetic construct
  source 1..41: mol_type = other RNA
ttggcgcagtcaatcccgttgtcataccaggaaatgagctt

SEQ ID NO: 5179 - RNA, 41 nt, synthetic construct
  source 1..41: mol_type = other RNA
cctctatagccaaattcggagtcataccaggaaatgagctt

SEQ ID NO: 5180 - RNA, 41 nt, synthetic construct
  source 1..41: mol_type = other RNA
ttgctgcggtaaatttcgttgtcataccaggaaatgagctt

SEQ ID NO: 5181 - RNA, 57 nt, synthetic construct
  source 1..57: mol_type = other RNA
ggtgcttggggccaaaatagttgagtcagtgtggccgtcataccaggaaatgagctt

SEQ ID NO: 5182 - RNA, 39 nt, synthetic construct
  source 1..39: mol_type = other RNA
tttgtagctagatttgttgtcataccaggaaatgagctt

SEQ ID NO: 5183 - RNA, 42 nt, synthetic construct
  source 1..42: mol_type = other RNA
accagctatagccaagttattgtcataccaggaaatgagctt

SEQ ID NO: 5184 - RNA, 41 nt, synthetic construct
  source 1..41: mol_type = other RNA
tgggtgtagccaaattcattgtcataccaggaaatgagctt

SEQ ID NO: 5185 - RNA, 42 nt, synthetic construct
  source 1..42: mol_type = other RNA
ggtccaccaccttcttagcgccagccaccggcgttgtcatac

SEQ ID NO: 5186 - RNA, 44 nt, synthetic construct
  source 1..44: mol_type = other RNA
ggtccaccaccactgaccagctacagccaagttagttgtcatac

SEQ ID NO: 5187 - RNA, 41 nt, synthetic construct
  source 1..41: mol_type = other RNA
ttagcgcagccaccggcgttttcataccaggaaatgagctt

SEQ ID NO: 5188 - RNA, 43 nt, synthetic construct
  source 1..43: mol_type = other RNA
ggtccaccaccatgggtgcttcgggccaaaatagttgtcatac

SEQ ID NO: 5189 - RNA, 41 nt, synthetic construct
  source 1..41: mol_type = other RNA
ttgcggtagccaggttgttggtcataccaggaaatgagctt

SEQ ID NO: 5190 - RNA, 41 nt, synthetic construct
  source 1..41: mol_type = other RNA
ctcctgcggccaaatttgttatcataccaggaaatgagctt

SEQ ID NO: 5191 - RNA, 43 nt, synthetic construct
  source 1..43: mol_type = other RNA
catgtgggccatgaggtccacacccatgggtgcttggggccaa

SEQ ID NO: 5192 - RNA, 41 nt, synthetic construct
  source 1..41: mol_type = other RNA
ggtccaccacccgaacaaggtagccaaattcgttgtcatac

SEQ ID NO: 5193 - RNA, 42 nt, synthetic construct
  source 1..42: mol_type = other RNA
ttgatgtagccaagttggtatgtcataccaggaaatgagctt

SEQ ID NO: 5194 - RNA, 43 nt, synthetic construct
  source 1..43: mol_type = other RNA
ggtccaccaccatgggtgcttggggccaaaatagttgtcatac

SEQ ID NO: 5195 - RNA, 41 nt, synthetic construct
  source 1..41: mol_type = other RNA
cggctgctgccacattagatgtcataccaggaaatgagctt

SEQ ID NO: 5196 - RNA, 42 nt, synthetic construct
  source 1..42: mol_type = other RNA
accagctacagccaagttattgtcataccaggaaatgagctt

SEQ ID NO: 5197 - RNA, 41 nt, synthetic construct
  source 1..41: mol_type = other RNA
ctcctgtggccaaatttgttatcataccaggaaatgagctt

SEQ ID NO: 5198 - RNA, 41 nt, synthetic construct
  source 1..41: mol_type = other RNA
ctggtgcagccagaatcattgtcataccaggaaatgagctt

SEQ ID NO: 5199 - RNA, 42 nt, synthetic construct
  source 1..42: mol_type = other RNA
ttagcgccagccaccggcgttttcataccaggaaatgagctt

SEQ ID NO: 5200 - RNA, 57 nt, synthetic construct
  source 1..57: mol_type = other RNA
ggtgcttcgggccaaaatagttgagtcagtgtggccgtcataccaggaaatgagctt

SEQ ID NO: 5201 - RNA, 42 nt, synthetic construct
  source 1..42: mol_type = other RNA
gttcagctcagggatgacttcgctctacagccttggcagcgc

SEQ ID NO: 5202 - RNA, 41 nt, synthetic construct
  source 1..41: mol_type = other RNA
gttcagctcagggatgaactcgctcacagacttggcagcgc

SEQ ID NO: 5203 - RNA, 41 nt, synthetic construct
  source 1..41: mol_type = other RNA
gttcagctcagggatgaccttacacacaaccttggcagcgc

SEQ ID NO: 5204 - RNA, 41 nt, synthetic construct
  source 1..41: mol_type = other RNA
gttcagctcagggatgcccttgcccacagccttggcagcgc

SEQ ID NO: 5205 - RNA, 41 nt, synthetic construct
  source 1..41: mol_type = other RNA
gttcagctcaggggtgacctcgcccccagcattggcagcgc

SEQ ID NO: 5206 - RNA, 41 nt, synthetic construct
  source 1..41: mol_type = other RNA
gttcagctcagggatgacttcgcccacaaccttggcagcgc

SEQ ID NO: 5207 - RNA, 41 nt, synthetic construct
  source 1..41: mol_type = other RNA
gttcagctcaggagtgacctcgctaacagccttggcagcgc

SEQ ID NO: 5208 - RNA, 41 nt, synthetic construct
  source 1..41: mol_type = other RNA
gttcagctcagggatgcactcgcccctagccttggcagcgc

SEQ ID NO: 5209 - RNA, 41 nt, synthetic construct
  source 1..41: mol_type = other RNA
gttcagctcaccgatggtctcgccgccagccttggcagcgc

SEQ ID NO: 5210 - RNA, 41 nt, synthetic construct
  source 1..41: mol_type = other RNA
gttcagctcaggaatgaactcgcccccagcgttggcagcgc

SEQ ID NO: 5211 - RNA, 41 nt, synthetic construct
  source 1..41: mol_type = other RNA
gttcagctcaggcatgaccccgccaacagccttggcagcgc

SEQ ID NO: 5212 - RNA, 39 nt, synthetic construct
  source 1..39: mol_type = other RNA
gttcagctcacggatgccctcgctcagctttggcagcgc

SEQ ID NO: 5213 - RNA, 41 nt, synthetic construct
  source 1..41: mol_type = other RNA
gttcagctcagggatggcgttacccagaaccttggcagcgc

SEQ ID NO: 5214 - RNA, 41 nt, synthetic construct
  source 1..41: mol_type = other RNA
gttcagctcaggaatgccctcgcccacagccttggcagcgc

SEQ ID NO: 5215 - RNA, 41 nt, synthetic construct
  source 1..41: mol_type = other RNA
gttcagctcagggatgtcctcgcccaccgtcttggcagcgc

SEQ ID NO: 5216 - RNA, 41 nt, synthetic construct
  source 1..41: mol_type = other RNA
gttcagctcacggatgccctcgcccacagccttggcagcgc

SEQ ID NO: 5217 - RNA, 41 nt, synthetic construct
  source 1..41: mol_type = other RNA
gttcagctcagggatgaactcgcccacagcattggcagcgc

SEQ ID NO: 5218 - RNA, 41 nt, synthetic construct
  source 1..41: mol_type = other RNA
gttcagctcagggcttacctcgcccccagccttggcagcgc

SEQ ID NO: 5219 - RNA, 41 nt, synthetic construct
  source 1..41: mol_type = other RNA
gttcagctcagggatgagctcgcccatggccttggcagcgc

SEQ ID NO: 5220 - RNA, 41 nt, synthetic construct
  source 1..41: mol_type = other RNA
gttcagctcagggacgacctcacccacaactttggcagcgc

SEQ ID NO: 5221 - RNA, 41 nt, synthetic construct
  source 1..41: mol_type = other RNA
gttcagctcagggatgacgtcgccgaaagccttggcagcgc

SEQ ID NO: 5222 - RNA, 41 nt, synthetic construct
  source 1..41: mol_type = other RNA
gttcagctcagggatgacctcgccgaccgcgttggcagcgc

SEQ ID NO: 5223 - RNA, 41 nt, synthetic construct
  source 1..41: mol_type = other RNA
gttcagctcagggatgacctcgccgacagccttggcagcgc

SEQ ID NO: 5224 - RNA, 41 nt, synthetic construct
  source 1..41: mol_type = other RNA
gttcagctcagaaatgaactcgcccaccgccttggcagcgc

SEQ ID NO: 5225 - RNA, 41 nt, synthetic construct
  source 1..41: mol_type = other RNA
gttcagctcagggatgtcttcgcccacagccttggcagcgc

SEQ ID NO: 5226 - RNA, 41 nt, synthetic construct
  source 1..41: mol_type = other RNA
gttcagctcagggatggcctcgcacacagctttggcagcgc

SEQ ID NO: 5227 - RNA, 41 nt, synthetic construct
  source 1..41: mol_type = other RNA
gttcagctcagggatgacctcgccccccgccttggcagcgc

SEQ ID NO: 5228 - RNA, 41 nt, synthetic construct
  source 1..41: mol_type = other RNA
gttcagctcagggttgacctcgcccccagccttggcagcgc

SEQ ID NO: 5229 - RNA, 41 nt, synthetic construct
  source 1..41: mol_type = other RNA
gttcagctcagggatgacctcacacacaaccttggcagcgc

SEQ ID NO: 5230 - RNA, 41 nt, synthetic construct
  source 1..41: mol_type = other RNA
gttcagctcagggatgacctcactcacagacttggcagcgc

SEQ ID NO: 5231 - RNA, 41 nt, synthetic construct
  source 1..41: mol_type = other RNA
gttcagctcagggctgacctcgcccccagccttggcagcgc

SEQ ID NO: 5232 - RNA, 41 nt, synthetic construct
  source 1..41: mol_type = other RNA
gttcagctcagggatggcgtcacccagaaccttggcagcgc

SEQ ID NO: 5233 - RNA, 41 nt, synthetic construct
  source 1..41: mol_type = other RNA
gttcagctcaggaatgacctcgcccacactcttggcagcgc

SEQ ID NO: 5234 - RNA, 42 nt, synthetic construct
  source 1..42: mol_type = other RNA
gttcagctcatggatgaccctacccaccagccttggcagcgc

SEQ ID NO: 5235 - RNA, 41 nt, synthetic construct
  source 1..41: mol_type = other RNA
gttcagctcagggatgacttcgcccacgtcattggcagcgc

SEQ ID NO: 5236 - RNA, 41 nt, synthetic construct
  source 1..41: mol_type = other RNA
gttcagctcagggatgacctcgcccacaaccttggcagcgc

SEQ ID NO: 5237 - RNA, 41 nt, synthetic construct
  source 1..41: mol_type = other RNA
gttcagctcacggatgacctcacccacagcattggcagcgc

SEQ ID NO: 5238 - RNA, 41 nt, synthetic construct
  source 1..41: mol_type = other RNA
gttcagctcagtaattaccccgccggtggccttggcagcgc

SEQ ID NO: 5239 - RNA, 41 nt, synthetic construct
  source 1..41: mol_type = other RNA
gttcagctcagggatgccctcgcccacagccttggcagcgc

SEQ ID NO: 5240 - RNA, 41 nt, synthetic construct
  source 1..41: mol_type = other RNA
gttcagctcacggatgatctcacccacagatttggcagcgc

SEQ ID NO: 5241 - RNA, 41 nt, synthetic construct
  source 1..41: mol_type = other RNA
gttcagctcagggatgacctcgcccccagccttggcagcgc

SEQ ID NO: 5242 - RNA, 42 nt, synthetic construct
  source 1..42: mol_type = other RNA
gttcagctcaggaatgacttcgcccacagcccttggcagcgc

SEQ ID NO: 5243 - RNA, 41 nt, synthetic construct
  source 1..41: mol_type = other RNA
ccagtgagcttcccgttcaggtcggggctggccccgcccac

SEQ ID NO: 5244 - RNA, 40 nt, synthetic construct
  source 1..40: mol_type = other RNA
gttcagctcacggatgacctcgccacagccttggcagcgc

SEQ ID NO: 5245 - RNA, 41 nt, synthetic construct
  source 1..41: mol_type = other RNA
gttcagctcagggacgacctcgcccatcaccttggcagcgc

SEQ ID NO: 5246 - RNA, 41 nt, synthetic construct
  source 1..41: mol_type = other RNA
ccagtgagcttcccgttcagctcaggaatgacttcgcccac

SEQ ID NO: 5247 - RNA, 41 nt, synthetic construct
  source 1..41: mol_type = other RNA
gttcagctcagggctgacctcaccaacagccttggcagcgc

SEQ ID NO: 5248 - RNA, 41 nt, synthetic construct
  source 1..41: mol_type = other RNA
ccagtgagcttcccgttcagctcagagatgaccccgcccac

SEQ ID NO: 5249 - RNA, 41 nt, synthetic construct
  source 1..41: mol_type = other RNA
gttcagctcaaggatgacctcaccaacagccttggcagcgc

SEQ ID NO: 5250 - RNA, 41 nt, synthetic construct
  source 1..41: mol_type = other RNA
gttcagctcaggggtgacctcgcccaaagccttggcagcgc

SEQ ID NO: 5251 - RNA, 40 nt, synthetic construct
  source 1..40: mol_type = other RNA
gttcagctcagggatgatctcgccatagccttggcagcgc

SEQ ID NO: 5252 - RNA, 41 nt, synthetic construct
  source 1..41: mol_type = other RNA
gttcagctcagggctgccctcgcttacagcattggcagcgc

SEQ ID NO: 5253 - RNA, 41 nt, synthetic construct
  source 1..41: mol_type = other RNA
gttcagctcagggatggcctcgcccacaaccttggcagcgc

SEQ ID NO: 5254 - RNA, 41 nt, synthetic construct
  source 1..41: mol_type = other RNA
ccagtgagcttcccgttcagctcagggatgtcctcgcccac

SEQ ID NO: 5255 - RNA, 41 nt, synthetic construct
  source 1..41: mol_type = other RNA
gttcagctcagggatgaacatacccacagccttggcagcgc

SEQ ID NO: 5256 - RNA, 42 nt, synthetic construct
  source 1..42: mol_type = other RNA
ccagtgagcttcccgttcagctcaaaggatgacctcgcccac

SEQ ID NO: 5257 - RNA, 41 nt, synthetic construct
  source 1..41: mol_type = other RNA
gttcagctcagggatgacctcgcccacagttttggcagcgc

SEQ ID NO: 5258 - RNA, 41 nt, synthetic construct
  source 1..41: mol_type = other RNA
gttcagctcagggatgacctcgcctacagccttggcagcgc

SEQ ID NO: 5259 - RNA, 41 nt, synthetic construct
  source 1..41: mol_type = other RNA
gttcagctcaggggtgacctcgcccacagtcttggcagcgc

SEQ ID NO: 5260 - RNA, 41 nt, synthetic construct
  source 1..41: mol_type = other RNA
gttcagctcaggcatgacctcgcagacagccttggcagcgc

SEQ ID NO: 5261 - RNA, 41 nt, synthetic construct
  source 1..41: mol_type = other RNA
gttcagctcagggacggcctcgcacacagtcttggcagcgc

SEQ ID NO: 5262 - RNA, 41 nt, synthetic construct
  source 1..41: mol_type = other RNA
gttcagctcaggaatgacctcgcccacagtcttggcagcgc

SEQ ID NO: 5263 - RNA, 41 nt, synthetic construct
  source 1..41: mol_type = other RNA
gttcagctcagggctggccccgcccgtagcgttggcagcgc

SEQ ID NO: 5264 - RNA, 41 nt, synthetic construct
  source 1..41: mol_type = other RNA
ccagtgagcttcccgttcagctcaggcatgaccccgccaac

SEQ ID NO: 5265 - RNA, 41 nt, synthetic construct
  source 1..41: mol_type = other RNA
gttcagctcaggcatggcctcgcccacataattggcagcgc

SEQ ID NO: 5266 - RNA, 41 nt, synthetic construct
  source 1..41: mol_type = other RNA
gttcagctcagagatggcctcgcccacagccttggcagcgc

SEQ ID NO: 5267 - RNA, 41 nt, synthetic construct
  source 1..41: mol_type = other RNA
gttcagctcagggatgtctccgcccacagccttggcagcgc

SEQ ID NO: 5268 - RNA, 41 nt, synthetic construct
  source 1..41: mol_type = other RNA
gttcagctcaggaatgcccttgcccacagccttggcagcgc

SEQ ID NO: 5269 - RNA, 41 nt, synthetic construct
  source 1..41: mol_type = other RNA
gttcagctcagggatgaacttgctcacagacttggcagcgc

SEQ ID NO: 5270 - RNA, 41 nt, synthetic construct
  source 1..41: mol_type = other RNA
gttcagctcagggatggtctcacccatagccttggcagcgc

SEQ ID NO: 5271 - RNA, 41 nt, synthetic construct
  source 1..41: mol_type = other RNA
gttcagctcacagatgacctcgcccacagccttggcagcgc

SEQ ID NO: 5272 - RNA, 40 nt, synthetic construct
  source 1..40: mol_type = other RNA
gttcagctcaaggacgacctcgcccaagccttggcagcgc

SEQ ID NO: 5273 - RNA, 41 nt, synthetic construct
  source 1..41: mol_type = other RNA
ccagtgagcttcccgttcagctcaggaatgccctcgcccac

SEQ ID NO: 5274 - RNA, 41 nt, synthetic construct
  source 1..41: mol_type = other RNA
ccagtgagcttcccgttcagctcaggggtgacctcgcccac

SEQ ID NO: 5275 - RNA, 41 nt, synthetic construct
  source 1..41: mol_type = other RNA
ccagtgagcttcccgttcagctcaaggatgagctcgcccac

SEQ ID NO: 5276 - RNA, 40 nt, synthetic construct
  source 1..40: mol_type = other RNA
gttcagctcaggaatgacctcgcctacagcttggcagcgc

SEQ ID NO: 5277 - RNA, 41 nt, synthetic construct
  source 1..41: mol_type = other RNA
gttcagctcagggatgacatcgcccatggccttggcagcgc

SEQ ID NO: 5278 - RNA, 41 nt, synthetic construct
  source 1..41: mol_type = other RNA
gttcagctcagggatgacctcgcccaaagccttggcagcgc

SEQ ID NO: 5279 - RNA, 41 nt, synthetic construct
  source 1..41: mol_type = other RNA
gttcagctcagggatgccctcagccacagccttggcagcgc

SEQ ID NO: 5280 - RNA, 41 nt, synthetic construct
  source 1..41: mol_type = other RNA
gttcagctcagggttgacctcacccacagccttggcagcgc

SEQ ID NO: 5281 - RNA, 41 nt, synthetic construct
  source 1..41: mol_type = other RNA
gttcagctcagtaatgacctcgcccacagccttggcagcgc

SEQ ID NO: 5282 - RNA, 41 nt, synthetic construct
  source 1..41: mol_type = other RNA
ccagtgagcttcccgttcagctcagggatggcctcgcccac

SEQ ID NO: 5283 - RNA, 41 nt, synthetic construct
  source 1..41: mol_type = other RNA
gttcagctcagggatgacctcacccacagacttggcagcgc

SEQ ID NO: 5284 - RNA, 41 nt, synthetic construct
  source 1..41: mol_type = other RNA
gttcagctcaggggtgaccttgcccacagtcttggcagcgc

SEQ ID NO: 5285 - RNA, 41 nt, synthetic construct
  source 1..41: mol_type = other RNA
gttcagctcagggctgacctcacccaaagccttggcagcgc

SEQ ID NO: 5286 - RNA, 41 nt, synthetic construct
  source 1..41: mol_type = other RNA
gttcagctcaggggtgacctcgcccacagccttggcagcgc

SEQ ID NO: 5287 - RNA, 41 nt, synthetic construct
  source 1..41: mol_type = other RNA
gttcagctcagggatgacctcgcgcacggccttggcagcgc

SEQ ID NO: 5288 - RNA, 41 nt, synthetic construct
  source 1..41: mol_type = other RNA
ccagtgagcttcccgttcagctcagggatgacttcgcccat

SEQ ID NO: 5289 - RNA, 41 nt, synthetic construct
  source 1..41: mol_type = other RNA
gttcagctcagggatgaccttgcccacagcattggcagcgc

SEQ ID NO: 5290 - RNA, 41 nt, synthetic construct
  source 1..41: mol_type = other RNA
gttcagctcagggatggtctcgcccagaagcttggcagcgc

SEQ ID NO: 5291 - RNA, 41 nt, synthetic construct
  source 1..41: mol_type = other RNA
gttcagctcaggagtgaccttgctaacagccttggcagcgc

SEQ ID NO: 5292 - RNA, 41 nt, synthetic construct
  source 1..41: mol_type = other RNA
gttcagctcagggttgacctcaccctcagccttggcagcgc

SEQ ID NO: 5293 - RNA, 41 nt, synthetic construct
  source 1..41: mol_type = other RNA
gttcagctcagggatgacctcgcccacagtcttggcagcgc

SEQ ID NO: 5294 - RNA, 42 nt, synthetic construct
  source 1..42: mol_type = other RNA
ccagtgagcttcccgttcagctcaagaaatgaactcgcccac

SEQ ID NO: 5295 - RNA, 41 nt, synthetic construct
  source 1..41: mol_type = other RNA
gttcagctcaggggtgacctcgcccacacccttggcagcgc

SEQ ID NO: 5296 - RNA, 41 nt, synthetic construct
  source 1..41: mol_type = other RNA
gttcagctcagggatgatctcgcccacgacgttggcagcgc

SEQ ID NO: 5297 - RNA, 41 nt, synthetic construct
  source 1..41: mol_type = other RNA
ccagtgagcttcccgttcagctcagggatgccctcgcccac

SEQ ID NO: 5298 - RNA, 41 nt, synthetic construct
  source 1..41: mol_type = other RNA
gttcagctcacagatgaccttgcccacagccttggcagcgc

SEQ ID NO: 5299 - RNA, 41 nt, synthetic construct
  source 1..41: mol_type = other RNA
ccagtgagcttcccgttcagctcagggatgacctcgcctac

SEQ ID NO: 5300 - RNA, 41 nt, synthetic construct
  source 1..41: mol_type = other RNA
ccagtgagcttcccgttcagctccggtctgaccccgcccac

SEQ ID NO: 5301 - RNA, 41 nt, synthetic construct
  source 1..41: mol_type = other RNA
gttcagctcagagatggccttgcccacagccttggcagcgc

SEQ ID NO: 5302 - RNA, 41 nt, synthetic construct
  source 1..41: mol_type = other RNA
gttcagctcagggatgacctcacacacaggcttggcagcgc

SEQ ID NO: 5303 - RNA, 41 nt, synthetic construct
  source 1..41: mol_type = other RNA
gttcagctcagggatgacctcacccacacccttggcagcgc

SEQ ID NO: 5304 - RNA, 41 nt, synthetic construct
  source 1..41: mol_type = other RNA
ccagtgagcttcccgttcagctcagggatgaactcgcccac

SEQ ID NO: 5305 - RNA, 41 nt, synthetic construct
  source 1..41: mol_type = other RNA
ccagtgagcttcccgttcagctccggaatgacctcgcccac

SEQ ID NO: 5306 - RNA, 41 nt, synthetic construct
  source 1..41: mol_type = other RNA
gttcagctcaaggatgagctcgcccacagccttggcagcgc

SEQ ID NO: 5307 - RNA, 41 nt, synthetic construct
  source 1..41: mol_type = other RNA
gttcagctcacggatgacctcgcccacagccttggcagcgc

SEQ ID NO: 5308 - RNA, 42 nt, synthetic construct
  source 1..42: mol_type = other RNA
ccagtgagcttcccgttcagctcagggatgacttcgctctac

SEQ ID NO: 5309 - RNA, 41 nt, synthetic construct
  source 1..41: mol_type = other RNA
ccagtgagcttcccgttcagcttagggatgccctcgcccac

SEQ ID NO: 5310 - RNA, 41 nt, synthetic construct
  source 1..41: mol_type = other RNA
gttcagctcagggatggccttgcacacagctttggcagcgc

SEQ ID NO: 5311 - RNA, 41 nt, synthetic construct
  source 1..41: mol_type = other RNA
ccagtgagcttcccgttcagctcaggaatgacctcgcccac

SEQ ID NO: 5312 - RNA, 41 nt, synthetic construct
  source 1..41: mol_type = other RNA
gttcagctcagggatgacctcgcccacagcattggcagcgc

SEQ ID NO: 5313 - RNA, 41 nt, synthetic construct
  source 1..41: mol_type = other RNA
gttcagctcagggataacctcgcctacagctttggcagcgc

SEQ ID NO: 5314 - RNA, 41 nt, synthetic construct
  source 1..41: mol_type = other RNA
gttcagctcagggatgtattcgcccacagccttggcagcgc

SEQ ID NO: 5315 - RNA, 41 nt, synthetic construct
  source 1..41: mol_type = other RNA
ccagtgagcttcccgttcagctaagggatgacctcgcccac

SEQ ID NO: 5316 - RNA, 41 nt, synthetic construct
  source 1..41: mol_type = other RNA
gttcagctcagggatgacctcgcccgccgccttggcagcgc

SEQ ID NO: 5317 - RNA, 41 nt, synthetic construct
  source 1..41: mol_type = other RNA
ccagtgagcttcccgttcagcacagggatgacctcgcccac

SEQ ID NO: 5318 - RNA, 41 nt, synthetic construct
  source 1..41: mol_type = other RNA
gttcagctcaggggtgaccttgcccccagcattggcagcgc

SEQ ID NO: 5319 - RNA, 42 nt, synthetic construct
  source 1..42: mol_type = other RNA
ccagtgagcttcccgttcagctcatggatgaccctacccacc

SEQ ID NO: 5320 - RNA, 41 nt, synthetic construct
  source 1..41: mol_type = other RNA
ccagtgagcttcccgttcagctcaggcatggcctcgcccac

SEQ ID NO: 5321 - RNA, 39 nt, synthetic construct
  source 1..39: mol_type = other RNA
ccagtgagcttcccgttcagcagggatgacctcgccgac

SEQ ID NO: 5322 - RNA, 41 nt, synthetic construct
  source 1..41: mol_type = other RNA
gttcagctcagggatgaccttgcccacagttttggcagcgc

SEQ ID NO: 5323 - RNA, 41 nt, synthetic construct
  source 1..41: mol_type = other RNA
ccagtgagcttcccgttcagctcagggatgacctcgccgac

SEQ ID NO: 5324 - RNA, 41 nt, synthetic construct
  source 1..41: mol_type = other RNA
gttcagctcagggcggacctcgcccagcgccttggcagcgc

SEQ ID NO: 5325 - RNA, 41 nt, synthetic construct
  source 1..41: mol_type = other RNA
ccagtgagcttcccgttcagcacagggatgacttcgcccac

SEQ ID NO: 5326 - RNA, 41 nt, synthetic construct
  source 1..41: mol_type = other RNA
gttcagctcagggacgacctcgcccacagccttggcagcgc

SEQ ID NO: 5327 - RNA, 41 nt, synthetic construct
  source 1..41: mol_type = other RNA
ccagtgagcttcccgttcagctcagggttgacctcgccccc

SEQ ID NO: 5328 - RNA, 41 nt, synthetic construct
  source 1..41: mol_type = other RNA
gttcagctcaggggtgacctcacccacagccttggcagcgc

SEQ ID NO: 5329 - RNA, 38 nt, synthetic construct
  source 1..38: mol_type = other RNA
gttcagctcagagatgaccccgcccacgttggcagcgc

SEQ ID NO: 5330 - RNA, 41 nt, synthetic construct
  source 1..41: mol_type = other RNA
gttcagctcagggatgacctcgcctaccgtcttggcagcgc

SEQ ID NO: 5331 - RNA, 41 nt, synthetic construct
  source 1..41: mol_type = other RNA
ccagtgagcttcccgttcagctctcggatgacctcgcccac

SEQ ID NO: 5332 - RNA, 41 nt, synthetic construct
  source 1..41: mol_type = other RNA
gttcagctcacggatgccgtcgcccacatccttggcagcgc

SEQ ID NO: 5333 - RNA, 41 nt, synthetic construct
  source 1..41: mol_type = other RNA
gttcagctcagggatgacctcgcccacggccttggcagcgc

SEQ ID NO: 5334 - RNA, 41 nt, synthetic construct
  source 1..41: mol_type = other RNA
ccagtgagcttcccgttcagctcaggaatgaactcgccccc

SEQ ID NO: 5335 - RNA, 41 nt, synthetic construct
  source 1..41: mol_type = other RNA
gttcagctcaggaatggtatcgcccaaggccttggcagcgc

SEQ ID NO: 5336 - RNA, 41 nt, synthetic construct
  source 1..41: mol_type = other RNA
gttcagctcacagactacctcgcccacagccttggcagcgc

SEQ ID NO: 5337 - RNA, 41 nt, synthetic construct
  source 1..41: mol_type = other RNA
gttcagctcagggctggtctcgcccaaagccttggcagcgc

SEQ ID NO: 5338 - RNA, 41 nt, synthetic construct
  source 1..41: mol_type = other RNA
ccagtgagcttcccgttcagctcagggataacctcgcccac

SEQ ID NO: 5339 - RNA, 41 nt, synthetic construct
  source 1..41: mol_type = other RNA
gttcagctcagggatgcccttagccacagccttggcagcgc

SEQ ID NO: 5340 - RNA, 41 nt, synthetic construct
  source 1..41: mol_type = other RNA
gttcagctcagggctcacctcgcacacagccttggcagcgc

SEQ ID NO: 5341 - RNA, 41 nt, synthetic construct
  source 1..41: mol_type = other RNA
ccagtgagcttcccgttcagctcagggatgtctccgcccac

SEQ ID NO: 5342 - RNA, 41 nt, synthetic construct
  source 1..41: mol_type = other RNA
gttcagctcaggtgtgatctcacccacggctttggcagcgc

SEQ ID NO: 5343 - RNA, 41 nt, synthetic construct
  source 1..41: mol_type = other RNA
gttcagctcagggctgacctcgcgtacagccttggcagcgc

SEQ ID NO: 5344 - RNA, 41 nt, synthetic construct
  source 1..41: mol_type = other RNA
ccagtgagcttcccgttcagctcagggatgtcttcgcccac

SEQ ID NO: 5345 - RNA, 41 nt, synthetic construct
  source 1..41: mol_type = other RNA
gttcagctcaaggatgacatcgcccacagccttggcagcgc

SEQ ID NO: 5346 - RNA, 41 nt, synthetic construct
  source 1..41: mol_type = other RNA
gttcagctcagtaatgaccttgcccacagccttggcagcgc

SEQ ID NO: 5347 - RNA, 41 nt, synthetic construct
  source 1..41: mol_type = other RNA
ccagtgagcttcccgttcagctcacggatgacctcgcccac

SEQ ID NO: 5348 - RNA, 41 nt, synthetic construct
  source 1..41: mol_type = other RNA
ccagtgagcttcccgttcagctcagggatgacctcgcccaa

SEQ ID NO: 5349 - RNA, 41 nt, synthetic construct
  source 1..41: mol_type = other RNA
tgaccttaaacacagtcttggcagcgccagtagaggcaggg

SEQ ID NO: 5350 - RNA, 42 nt, synthetic construct
  source 1..42: mol_type = other RNA
gttcagctcaaaggatgacctcgcccacagacttggcagcgc

SEQ ID NO: 5351 - RNA, 41 nt, synthetic construct
  source 1..41: mol_type = other RNA
gttcagctcagggatgaccttgcccacagccttggcagcgc

SEQ ID NO: 5352 - RNA, 41 nt, synthetic construct
  source 1..41: mol_type = other RNA
tgatctcacccacagctttggcagcgccagtagaggcaggg

SEQ ID NO: 5353 - RNA, 41 nt, synthetic construct
  source 1..41: mol_type = other RNA
gttcagctcagggataaccttgcctacagctttggcagcgc

SEQ ID NO: 5354 - RNA, 40 nt, synthetic construct
  source 1..40: mol_type = other RNA
ccagtgagcttcccgttcagctcacggatgacctcgccac

SEQ ID NO: 5355 - RNA, 41 nt, synthetic construct
  source 1..41: mol_type = other RNA
ccagtgagcttcccgttcagttcagagatggcctcgcccac

SEQ ID NO: 5356 - RNA, 41 nt, synthetic construct
  source 1..41: mol_type = other RNA
ccagtgagcttcccgttcagctcagggctgacctcgcccaa

SEQ ID NO: 5357 - RNA, 41 nt, synthetic construct
  source 1..41: mol_type = other RNA
ccagtgagcttcccgttcagctcagggatgcccttgcccac

SEQ ID NO: 5358 - RNA, 41 nt, synthetic construct
  source 1..41: mol_type = other RNA
gttcagctcagggatgaccttgccgaccgcgttggcagcgc

SEQ ID NO: 5359 - RNA, 40 nt, synthetic construct
  source 1..40: mol_type = other RNA
gttcagctcacggatgaccttgccacagccttggcagcgc

SEQ ID NO: 5360 - RNA, 41 nt, synthetic construct
  source 1..41: mol_type = other RNA
gttcagctcagggataaccttgcccacagctttggcagcgc

SEQ ID NO: 5361 - RNA, 41 nt, synthetic construct
  source 1..41: mol_type = other RNA
gttcagctcagggatgacctcacccatagccttggcagcgc

SEQ ID NO: 5362 - RNA, 41 nt, synthetic construct
  source 1..41: mol_type = other RNA
gttcagctcagggatgacctcacccacagccttggcagcgc

SEQ ID NO: 5363 - RNA, 41 nt, synthetic construct
  source 1..41: mol_type = other RNA
gttcagctcaggggtgacctcgcacacggtcttggcagcgc

SEQ ID NO: 5364 - RNA, 41 nt, synthetic construct
  source 1..41: mol_type = other RNA
gttcagctcaaggatgatatcgcccaccgtcttggcagcgc

SEQ ID NO: 5365 - RNA, 41 nt, synthetic construct
  source 1..41: mol_type = other RNA
ccagtgagcttcccgttcagcccagacgagaccccgccctc

SEQ ID NO: 5366 - RNA, 41 nt, synthetic construct
  source 1..41: mol_type = other RNA
ccagtgagcttcccgttcagctcagggcggacctcgcccag

SEQ ID NO: 5367 - RNA, 42 nt, synthetic construct
  source 1..42: mol_type = other RNA
gttcagctcatggatgaccccacccaccagccttggcagcgc

SEQ ID NO: 5368 - RNA, 41 nt, synthetic construct
  source 1..41: mol_type = other RNA
gttcagctcaggggaaaccgtacccacagccttggcagcgc

SEQ ID NO: 5369 - RNA, 41 nt, synthetic construct
  source 1..41: mol_type = other RNA
gttcagctcagggatgacctcgcccacagccttggcagcgc

SEQ ID NO: 5370 - RNA, 41 nt, synthetic construct
  source 1..41: mol_type = other RNA
ccagtgagcttcccgttcagctcacagatgacctcgcccac

SEQ ID NO: 5371 - RNA, 41 nt, synthetic construct
  source 1..41: mol_type = other RNA
gttcagctcagggatgacctcgaccatagccttggcagcgc

SEQ ID NO: 5372 - RNA, 41 nt, synthetic construct
  source 1..41: mol_type = other RNA
ccagtgagcttcccgttcagctcaggggtgacctcgcccaa

SEQ ID NO: 5373 - RNA, 43 nt, synthetic construct
  source 1..43: mol_type = other RNA
gttcagctcagggatgacctcaccctacagaccttggcagcgc

SEQ ID NO: 5374 - RNA, 41 nt, synthetic construct
  source 1..41: mol_type = other RNA
gttcagctcaggcataacctcacccacagccttggcagcgc

SEQ ID NO: 5375 - RNA, 41 nt, synthetic construct
  source 1..41: mol_type = other RNA
gttcagctcacggatgacctcgcagaatgccttggcagcgc

SEQ ID NO: 5376 - RNA, 42 nt, synthetic construct
  source 1..42: mol_type = other RNA
gttcagctcagggatgacttcacccacatgccttggcagcgc

SEQ ID NO: 5377 - RNA, 41 nt, synthetic construct
  source 1..41: mol_type = other RNA
ccagtgagcttcccgttcagctgagggacgacctcgcccac

SEQ ID NO: 5378 - RNA, 41 nt, synthetic construct
  source 1..41: mol_type = other RNA
gttcagctcagggctaacctcacacacagccttggcagcgc

SEQ ID NO: 5379 - RNA, 41 nt, synthetic construct
  source 1..41: mol_type = other RNA
gttcagctcagggatgaccttgcccacagtcttggcagcgc

SEQ ID NO: 5380 - RNA, 41 nt, synthetic construct
  source 1..41: mol_type = other RNA
gttcagctcagggataacctcgcccacagctttggcagcgc

SEQ ID NO: 5381 - RNA, 41 nt, synthetic construct
  source 1..41: mol_type = other RNA
ccagtgagcttcccgttcagctcagggatgacctcgccccc

SEQ ID NO: 5382 - RNA, 41 nt, synthetic construct
  source 1..41: mol_type = other RNA
tgacctcaccaacagccttggcagcgccagtagaggcaggg

SEQ ID NO: 5383 - RNA, 41 nt, synthetic construct
  source 1..41: mol_type = other RNA
ccagtgagcttcccgttcagctcagggatgacctcgcccag

SEQ ID NO: 5384 - RNA, 52 nt, synthetic construct
  source 1..52: mol_type = other RNA
ccagtgagcttcccgttcagctcagggatgacctgacagtcaccctgccctc

SEQ ID NO: 5385 - RNA, 41 nt, synthetic construct
  source 1..41: mol_type = other RNA
ccagtgagcttcccgttcagctcagggccgacctcgcccac

SEQ ID NO: 5386 - RNA, 41 nt, synthetic construct
  source 1..41: mol_type = other RNA
ccagtgagcttcccgttcagctcaaggatgacatcgcccac

SEQ ID NO: 5387 - RNA, 42 nt, synthetic construct
  source 1..42: mol_type = other RNA
gttcagctcagggataacttcaccctacagtcttggcagcgc

SEQ ID NO: 5388 - RNA, 41 nt, synthetic construct
  source 1..41: mol_type = other RNA
gttcagctcagggacgacctcacccacagccttggcagcgc

SEQ ID NO: 5389 - RNA, 43 nt, synthetic construct
  source 1..43: mol_type = other RNA
gttcagctcaggccgatgacctcacccacagccttggcagcgc

SEQ ID NO: 5390 - RNA, 41 nt, synthetic construct
  source 1..41: mol_type = other RNA
ccagtgagcttcccgttcagttccgtaatgacctcgcccac

SEQ ID NO: 5391 - RNA, 41 nt, synthetic construct
  source 1..41: mol_type = other RNA
ccagtgagcttcccgttcagatcagggatgacctcgcccac

SEQ ID NO: 5392 - RNA, 41 nt, synthetic construct
  source 1..41: mol_type = other RNA
ccagtgagcttcccgttcagctcagggatgaccttgccgac

SEQ ID NO: 5393 - RNA, 41 nt, synthetic construct
  source 1..41: mol_type = other RNA
ccagtgagcttcccgttcagctcgggggtgacctcgcccac

SEQ ID NO: 5394 - RNA, 41 nt, synthetic construct
  source 1..41: mol_type = other RNA
ccagtgagcttcccgttcagctcgggagtgacctcgccaac

SEQ ID NO: 5395 - RNA, 41 nt, synthetic construct
  source 1..41: mol_type = other RNA
gttcagctcaggactaacctcacccacagccttggcagcgc

SEQ ID NO: 5396 - RNA, 40 nt, synthetic construct
  source 1..40: mol_type = other RNA
gttcagctcagggctgacctcgctcacagattggcagcgc

SEQ ID NO: 5397 - RNA, 41 nt, synthetic construct
  source 1..41: mol_type = other RNA
ccagtgagcttcccgttcagcgcagggatgacctcgccccc

SEQ ID NO: 5398 - RNA, 41 nt, synthetic construct
  source 1..41: mol_type = other RNA
ccagtgagcttcccgttcagctcagggatgacctcacccat

SEQ ID NO: 5399 - RNA, 42 nt, synthetic construct
  source 1..42: mol_type = other RNA
tgactttgcccacagcccttggcagcgccagtagaggcaggg

SEQ ID NO: 5400 - RNA, 41 nt, synthetic construct
  source 1..41: mol_type = other RNA
gttcagctcagggctgaccttacccacaaaattggcagcgc

SEQ ID NO: 5401 - RNA, 41 nt, synthetic construct
  source 1..41: mol_type = other RNA
ccagtgagcttcccgttcagaacagggacgacctcgcccac

SEQ ID NO: 5402 - RNA, 41 nt, synthetic construct
  source 1..41: mol_type = other RNA
ccagtgagcttcccgttcagctcaaggacgacctcacccac

SEQ ID NO: 5403 - RNA, 41 nt, synthetic construct
  source 1..41: mol_type = other RNA
tgacctcgcctacagccttggcagcgccagtagaggcaggg

SEQ ID NO: 5404 - RNA, 41 nt, synthetic construct
  source 1..41: mol_type = other RNA
ccagtgagcttcccgttcagctcagggatgactttgcccat

SEQ ID NO: 5405 - RNA, 41 nt, synthetic construct
  source 1..41: mol_type = other RNA
gttcagctcaggagtgatctcacccacggctttggcagcgc

SEQ ID NO: 5406 - RNA, 41 nt, synthetic construct
  source 1..41: mol_type = other RNA
gttcagctcagggatgagcttgcccatggccttggcagcgc

SEQ ID NO: 5407 - RNA, 41 nt, synthetic construct
  source 1..41: mol_type = other RNA
tgacctcacccatagccttggcagcgccagtagaggcaggg

SEQ ID NO: 5408 - RNA, 41 nt, synthetic construct
  source 1..41: mol_type = other RNA
ccagtgagcttcccgttcagcccagggatgaactcgcccac

SEQ ID NO: 5409 - RNA, 41 nt, synthetic construct
  source 1..41: mol_type = other RNA
ccagtgagcttcccgttcagctcagggatgacctcgcccac

SEQ ID NO: 5410 - RNA, 41 nt, synthetic construct
  source 1..41: mol_type = other RNA
tgaccttgcccacagccttgccagcgccagtagaggcaggg

SEQ ID NO: 5411 - RNA, 42 nt, synthetic construct
  source 1..42: mol_type = other RNA
gttcagctcagggatgaccgttgcccacagccttggcagcgc

SEQ ID NO: 5412 - RNA, 41 nt, synthetic construct
  source 1..41: mol_type = other RNA
ccagtgagcttcccgttcagctcagggatgacctcacccac

SEQ ID NO: 5413 - RNA, 41 nt, synthetic construct
  source 1..41: mol_type = other RNA
cgacctcgcccacagccttggcagcgccagtagaggcaggg

SEQ ID NO: 5414 - RNA, 42 nt, synthetic construct
  source 1..42: mol_type = other RNA
ccagtgagcttcccgttcagctcagggatgaccgtcgcccac

SEQ ID NO: 5415 - RNA, 41 nt, synthetic construct
  source 1..41: mol_type = other RNA
ccagtgagcttcccgttcagctcagggatgacctcactcac

SEQ ID NO: 5416 - RNA, 41 nt, synthetic construct
  source 1..41: mol_type = other RNA
gttcagctcagggaagacctcacccacagccttggcagcgc

SEQ ID NO: 5417 - RNA, 41 nt, synthetic construct
  source 1..41: mol_type = other RNA
ccagtgagcttcccgttcagcccacagactacctcgcccac

SEQ ID NO: 5418 - RNA, 41 nt, synthetic construct
  source 1..41: mol_type = other RNA
tgacctcgcagaatgccttggcagcgccagtagaggcaggg

SEQ ID NO: 5419 - RNA, 41 nt, synthetic construct
  source 1..41: mol_type = other RNA
gttcagctcagggatgtcctctcccacagcattggcagcgc

SEQ ID NO: 5420 - RNA, 41 nt, synthetic construct
  source 1..41: mol_type = other RNA
ccagtgagcttcccgttcagctctgggatgagctcgcccat

SEQ ID NO: 5421 - RNA, 41 nt, synthetic construct
  source 1..41: mol_type = other RNA
gttcagctcaggtctgaccccgcccacagccttggcagcgc

SEQ ID NO: 5422 - RNA, 41 nt, synthetic construct
  source 1..41: mol_type = other RNA
ccagtgagcttcccgttcagctcagggatgacctcgcgcac

SEQ ID NO: 5423 - RNA, 41 nt, synthetic construct
  source 1..41: mol_type = other RNA
ccagtgagcttcccgttcagctcagggatgaccacgcccac

SEQ ID NO: 5424 - RNA, 41 nt, synthetic construct
  source 1..41: mol_type = other RNA
ccagtgagcttcccgttcagctcagggctgaccttacccac

SEQ ID NO: 5425 - RNA, 41 nt, synthetic construct
  source 1..41: mol_type = other RNA
gttcagctcagggctgacctcacccacaaaattggcagcgc

SEQ ID NO: 5426 - RNA, 41 nt, synthetic construct
  source 1..41: mol_type = other RNA
ccagtgagcttcccgttcagctcagggctgccctcgcttac

SEQ ID NO: 5427 - RNA, 41 nt, synthetic construct
  source 1..41: mol_type = other RNA
ccagtgagcttcccgttcagttcagagatggccttgcccac

SEQ ID NO: 5428 - RNA, 41 nt, synthetic construct
  source 1..41: mol_type = other RNA
ccagtgagcttcccgttcagctcagggcttacctcgccccc

SEQ ID NO: 5429 - RNA, 41 nt, synthetic construct
  source 1..41: mol_type = other RNA
ccagtgagcttcccgttcagatcagggatgcactcgcccct

SEQ ID NO: 5430 - RNA, 41 nt, synthetic construct
  source 1..41: mol_type = other RNA
tgaccttacccacagctttggcagcgccagtagaggcaggg

SEQ ID NO: 5431 - RNA, 41 nt, synthetic construct
  source 1..41: mol_type = other RNA
ccagtgagcttcccgttcagctctaaaatgacatcgcccac

SEQ ID NO: 5432 - RNA, 41 nt, synthetic construct
  source 1..41: mol_type = other RNA
ccagtgagcttcccgttcagctccgggacgacctcgcccat

SEQ ID NO: 5433 - RNA, 41 nt, synthetic construct
  source 1..41: mol_type = other RNA
tgacctcaccctcagccttggcagcgccagtagaggcaggg

SEQ ID NO: 5434 - RNA, 40 nt, synthetic construct
  source 1..40: mol_type = other RNA
ccagtgagcttcccgttcagctcagggatgacctcgccac

SEQ ID NO: 5435 - RNA, 40 nt, synthetic construct
  source 1..40: mol_type = other RNA
ccagtgagcttcccgttcagttcaaggacgacctcgccca

SEQ ID NO: 5436 - RNA, 41 nt, synthetic construct
  source 1..41: mol_type = other RNA
ccagtgagcttcccgttcagcacaggaatgacctcgcctac

SEQ ID NO: 5437 - RNA, 41 nt, synthetic construct
  source 1..41: mol_type = other RNA
tgacctcacccacacccttggcagcgccagtagaggcaggg

SEQ ID NO: 5438 - RNA, 41 nt, synthetic construct
  source 1..41: mol_type = other RNA
tgacctcacccacagcctgggcagcgccagtagaggcaggg

SEQ ID NO: 5439 - RNA, 41 nt, synthetic construct
  source 1..41: mol_type = other RNA
ccagtgagcttcccgttcagctcaccgatgacctcgccgcc

SEQ ID NO: 5440 - RNA, 41 nt, synthetic construct
  source 1..41: mol_type = other RNA
cgacctcgcccacggtgttggcagcgccagtagaggcaggg

SEQ ID NO: 5441 - RNA, 41 nt, synthetic construct
  source 1..41: mol_type = other RNA
ccagtgagcttcccgttcagcacagggataacctcgcctac

SEQ ID NO: 5442 - RNA, 41 nt, synthetic construct
  source 1..41: mol_type = other RNA
ccagtgagcttcccgttcagctcagggttgacctcacccac

SEQ ID NO: 5443 - RNA, 41 nt, synthetic construct
  source 1..41: mol_type = other RNA
gttcagctcagggacgaccttgcccacagccttggcagcgc

SEQ ID NO: 5444 - RNA, 41 nt, synthetic construct
  source 1..41: mol_type = other RNA
tgacctcactcacagacttggcagcgccagtagaggcaggg

SEQ ID NO: 5445 - RNA, 41 nt, synthetic construct
  source 1..41: mol_type = other RNA
gttcagctcaggcatgaccttgcagacagccttggcagcgc

SEQ ID NO: 5446 - RNA, 41 nt, synthetic construct
  source 1..41: mol_type = other RNA
ccagtgagcttcccgttcagctcagggctgacctcacccaa

SEQ ID NO: 5447 - RNA, 41 nt, synthetic construct
  source 1..41: mol_type = other RNA
tgaccctgccaacagccttggcagcgccagtagaggcaggg

SEQ ID NO: 5448 - RNA, 41 nt, synthetic construct
  source 1..41: mol_type = other RNA
ccagtgagcttcccgttcagctcagggaagacctcacccac

SEQ ID NO: 5449 - RNA, 41 nt, synthetic construct
  source 1..41: mol_type = other RNA
gttcagctcaggaatgaacttgcccccagcgttggcagcgc

SEQ ID NO: 5450 - RNA, 42 nt, synthetic construct
  source 1..42: mol_type = other RNA
gttcagctcaggaatgactttgcccacagcccttggcagcgc

SEQ ID NO: 5451 - RNA, 41 nt, synthetic construct
  source 1..41: mol_type = other RNA
gttcagctcagggtcaacctcacccacagccttggcagcgc

SEQ ID NO: 5452 - RNA, 41 nt, synthetic construct
  source 1..41: mol_type = other RNA
ccagtgagcttcccgttcagctcagggataaccttgcccac

SEQ ID NO: 5453 - RNA, 41 nt, synthetic construct
  source 1..41: mol_type = other RNA
ccagtgagcttcccgttcagtgtagggacggcctcgcacac

SEQ ID NO: 5454 - RNA, 41 nt, synthetic construct
  source 1..41: mol_type = other RNA
gttcagctcagggccgacctcgcccacggtgttggcagcgc

SEQ ID NO: 5455 - RNA, 41 nt, synthetic construct
  source 1..41: mol_type = other RNA
ccagtgagcttcccgttcagctcagggctgacctcgccccc

SEQ ID NO: 5456 - RNA, 41 nt, synthetic construct
  source 1..41: mol_type = other RNA
tgaactcgcccaccgccttggcagcgccagtagaggcaggg

SEQ ID NO: 5457 - RNA, 41 nt, synthetic construct
  source 1..41: mol_type = other RNA
ccagtgagcttcccgttcagctcacggatgacctcacccac

SEQ ID NO: 5458 - RNA, 41 nt, synthetic construct
  source 1..41: mol_type = other RNA
tgaccccgccaacagccttggcagcgccagtagaggcaggg

SEQ ID NO: 5459 - RNA, 41 nt, synthetic construct
  source 1..41: mol_type = other RNA
ccagtgagcttcccgttcagttcagggatgacttcgcccac

SEQ ID NO: 5460 - RNA, 41 nt, synthetic construct
  source 1..41: mol_type = other RNA
ccagtgagcttcccgttcagcagagggatgacctcgcccac

SEQ ID NO: 5461 - RNA, 41 nt, synthetic construct
  source 1..41: mol_type = other RNA
ccagtgagcttcccgttcagctcagggatgaccttacacac

SEQ ID NO: 5462 - RNA, 42 nt, synthetic construct
  source 1..42: mol_type = other RNA
ccagtgagcttcccgttcagcgacaaggatgacctcgccccc

SEQ ID NO: 5463 - RNA, 41 nt, synthetic construct
  source 1..41: mol_type = other RNA
ccagtgagcttcccgttcagctcagggatgaacttgcccac

SEQ ID NO: 5464 - RNA, 41 nt, synthetic construct
  source 1..41: mol_type = other RNA
tgaccacgcccacggccttggcagcgccagtagaggcaggg

SEQ ID NO: 5465 - RNA, 43 nt, synthetic construct
  source 1..43: mol_type = other RNA
ccagtgagcttcccgttcagctcaggtctgaccccacccacgc

SEQ ID NO: 5466 - RNA, 42 nt, synthetic construct
  source 1..42: mol_type = other RNA
ccagtgagcttcccgttcagctcatggatgaccccacccacc

SEQ ID NO: 5467 - RNA, 41 nt, synthetic construct
  source 1..41: mol_type = other RNA
gttcagctcagggatgacattgcccatggccttggcagcgc

SEQ ID NO: 5468 - RNA, 41 nt, synthetic construct
  source 1..41: mol_type = other RNA
tgacctcacccacagcattgccagcgccagtagaggcaggg

SEQ ID NO: 5469 - RNA, 41 nt, synthetic construct
  source 1..41: mol_type = other RNA
gttcagctcagggatgacctctcccaccgccttggcagcgc

SEQ ID NO: 5470 - RNA, 41 nt, synthetic construct
  source 1..41: mol_type = other RNA
gttcagctcagacgagaccccgccctcagctttggcagcgc

SEQ ID NO: 5471 - RNA, 41 nt, synthetic construct
  source 1..41: mol_type = other RNA
tgaacatacccacagcctaggcagcgccagtagaggcaggg

SEQ ID NO: 5472 - RNA, 41 nt, synthetic construct
  source 1..41: mol_type = other RNA
tgacctcgcccacagtcttggcagcgccagtagaggcaggg

SEQ ID NO: 5473 - RNA, 41 nt, synthetic construct
  source 1..41: mol_type = other RNA
ccagtgagcttcccgttcagctaagggatgacctctcccac

SEQ ID NO: 5474 - RNA, 41 nt, synthetic construct
  source 1..41: mol_type = other RNA
ccagtgagcttcccgttcagcacagggatgatctcacccac

SEQ ID NO: 5475 - RNA, 42 nt, synthetic construct
  source 1..42: mol_type = other RNA
ccagtgagcttcccgttcagcgacaaggatgaccttgccccc

SEQ ID NO: 5476 - RNA, 41 nt, synthetic construct
  source 1..41: mol_type = other RNA
ccagtgagcttcccgttcagctcagggatgaccttgcccac

SEQ ID NO: 5477 - RNA, 41 nt, synthetic construct
  source 1..41: mol_type = other RNA
ccagtgagcttcccgttcagctcagggatgaccttacccag

SEQ ID NO: 5478 - RNA, 41 nt, synthetic construct
  source 1..41: mol_type = other RNA
ccagtgagcttcccgttcagctcagggctgacctcacccac

SEQ ID NO: 5479 - RNA, 41 nt, synthetic construct
  source 1..41: mol_type = other RNA
ccagtgagcttcccgttcagctcaggaatgactttgcccac

SEQ ID NO: 5480 - RNA, 42 nt, synthetic construct
  source 1..42: mol_type = other RNA
gttcagctcaggactgacttcaccctacagtcttggcagcgc

SEQ ID NO: 5481 - RNA, 41 nt, synthetic construct
  source 1..41: mol_type = other RNA
gttcagctcagggatgaccttgtccacagctttggcagcgc

SEQ ID NO: 5482 - RNA, 42 nt, synthetic construct
  source 1..42: mol_type = other RNA
gttcagctcagggatgaccgtcgcccacagccttggcagcgc

SEQ ID NO: 5483 - RNA, 41 nt, synthetic construct
  source 1..41: mol_type = other RNA
tgacctcacccacagctttggcagcgccagtagaggcaggg

SEQ ID NO: 5484 - RNA, 41 nt, synthetic construct
  source 1..41: mol_type = other RNA
agacctcacccacagccttggcagcgccagtagaggcaggg

SEQ ID NO: 5485 - RNA, 41 nt, synthetic construct
  source 1..41: mol_type = other RNA
gttcagctcagggatgacctttcccaccgccttggcagcgc

SEQ ID NO: 5486 - RNA, 40 nt, synthetic construct
  source 1..40: mol_type = other RNA
ccagtgagcttcccgttcagtcagggatgacattgcccat

SEQ ID NO: 5487 - RNA, 43 nt, synthetic construct
  source 1..43: mol_type = other RNA
tgacctcaccctacagaccttgacagcgccagtagaggcaggg

SEQ ID NO: 5488 - RNA, 41 nt, synthetic construct
  source 1..41: mol_type = other RNA
gttcagctcagggatgaccacgcccacggccttggcagcgc

SEQ ID NO: 5489 - RNA, 41 nt, synthetic construct
  source 1..41: mol_type = other RNA
tgacctcacccacaaaagtggcagcgccagtagaggcaggg

SEQ ID NO: 5490 - RNA, 41 nt, synthetic construct
  source 1..41: mol_type = other RNA
ccagtgagcttcccgttcagctcagggatgtcctttcccac

SEQ ID NO: 5491 - RNA, 41 nt, synthetic construct
  source 1..41: mol_type = other RNA
tgacctcacccacagccatggcagcgccagtagaggcaggg

SEQ ID NO: 5492 - RNA, 41 nt, synthetic construct
  source 1..41: mol_type = other RNA
gttcagctcagggatgaaatcactcacagccttggcagcgc

SEQ ID NO: 5493 - RNA, 41 nt, synthetic construct
  source 1..41: mol_type = other RNA
ccagtgagcttcccgttcagctcggggaaaaccgtacccac

SEQ ID NO: 5494 - RNA, 42 nt, synthetic construct
  source 1..42: mol_type = other RNA
ccagtgagcttcccgttcagctcagggataacttcaccctac

SEQ ID NO: 5495 - RNA, 41 nt, synthetic construct
  source 1..41: mol_type = other RNA
tgacctcacccacagacttggcagcgccagtagaggcaggg

SEQ ID NO: 5496 - RNA, 39 nt, synthetic construct
  source 1..39: mol_type = other RNA
ccagtgagcttcccgttcagcacggatgccgtcgcccac

SEQ ID NO: 5497 - RNA, 41 nt, synthetic construct
  source 1..41: mol_type = other RNA
tgaccttgcccacagccttggcagcgccagtagaggcaggg

SEQ ID NO: 5498 - RNA, 41 nt, synthetic construct
  source 1..41: mol_type = other RNA
ccagtgagcttcccgttcagctcagggatgaccgcgcccac

SEQ ID NO: 5499 - RNA, 41 nt, synthetic construct
  source 1..41: mol_type = other RNA
caacctcacccacagccgtggcagcgccagtagaggcaggg

SEQ ID NO: 5500 - RNA, 41 nt, synthetic construct
  source 1..41: mol_type = other RNA
tgacctctcccacagccttggcagcgccagtagaggcaggg

SEQ ID NO: 5501 - RNA, 41 nt, synthetic construct
  source 1..41: mol_type = other RNA
tgaccttgcagaatgccttggcagcgccagtagaggcaggg

SEQ ID NO: 5502 - RNA, 41 nt, synthetic construct
  source 1..41: mol_type = other RNA
gttcagctcaggcatgaccctgccaacagccttggcagcgc

SEQ ID NO: 5503 - RNA, 41 nt, synthetic construct
  source 1..41: mol_type = other RNA
ccagtgagcttcccgttcagctcagggatggcgttacccag

SEQ ID NO: 5504 - RNA, 46 nt, synthetic construct
  source 1..46: mol_type = other RNA
gttcagctcaaggacgacctcacccaccgcctagccttggcagcgc

SEQ ID NO: 5505 - RNA, 41 nt, synthetic construct
  source 1..41: mol_type = other RNA
tgaactcgcccacagcattggcagcgccagtagaggcaggg

SEQ ID NO: 5506 - RNA, 39 nt, synthetic construct
  source 1..39: mol_type = other RNA
ccagtgagcttcccgttcagatcacggatgccctcgccc

SEQ ID NO: 5507 - RNA, 41 nt, synthetic construct
  source 1..41: mol_type = other RNA
cgacctcacccacaacttgagcagcgccagtagaggcaggg

SEQ ID NO: 5508 - RNA, 41 nt, synthetic construct
  source 1..41: mol_type = other RNA
gttcagctcagggatgaccgtgcccacggccttggcagcgc

SEQ ID NO: 5509 - RNA, 41 nt, synthetic construct
  source 1..41: mol_type = other RNA
tgaccttgtccacagctttggcagcgccagtagaggcaggg

SEQ ID NO: 5510 - RNA, 41 nt, synthetic construct
  source 1..41: mol_type = other RNA
ccagtgagcttcccgttcagctcaggaatgaacttgccccc

SEQ ID NO: 5511 - RNA, 41 nt, synthetic construct
  source 1..41: mol_type = other RNA
tgacctccccattggccttggcagcgccagtagaggcaggg

SEQ ID NO: 5512 - RNA, 41 nt, synthetic construct
  source 1..41: mol_type = other RNA
ccagtgagcttcccgttcagctctgggatgaccttcccatt

SEQ ID NO: 5513 - RNA, 41 nt, synthetic construct
  source 1..41: mol_type = other RNA
ccagtgagcttcccgttcagctctgggatgacctccccatt

SEQ ID NO: 5514 - RNA, 41 nt, synthetic construct
  source 1..41: mol_type = other RNA
ccagtgagcttcccgttcagttcagggatgacctcacccac

SEQ ID NO: 5515 - RNA, 41 nt, synthetic construct
  source 1..41: mol_type = other RNA
ccagtgagcttcccgttcagctaagggctgacctcgctcac

SEQ ID NO: 5516 - RNA, 41 nt, synthetic construct
  source 1..41: mol_type = other RNA
ccagtgagcttcccgttcagctcagggatgtctgtgccctc

SEQ ID NO: 5517 - RNA, 41 nt, synthetic construct
  source 1..41: mol_type = other RNA
ccagtgagcttcccgttcagctcaggaatgcccttgcccac

SEQ ID NO: 5518 - RNA, 41 nt, synthetic construct
  source 1..41: mol_type = other RNA
tgacctcgcagacagccttggcagcgccagtagaggcaggg

SEQ ID NO: 5519 - RNA, 42 nt, synthetic construct
  source 1..42: mol_type = other RNA
ccagtgagcttcccgttcagctcagggatgaccgttgcccac

SEQ ID NO: 5520 - RNA, 41 nt, synthetic construct
  source 1..41: mol_type = other RNA
ccagtgagcttcccgttcagctcagggatgacctcacccag

SEQ ID NO: 5521 - RNA, 41 nt, synthetic construct
  source 1..41: mol_type = other RNA
gttcagctcagggctgacctctcccacagccttggcagcgc

SEQ ID NO: 5522 - RNA, 41 nt, synthetic construct
  source 1..41: mol_type = other RNA
ccagtgagcttcccgttcagctcacagatgaccttgcccac

SEQ ID NO: 5523 - RNA, 41 nt, synthetic construct
  source 1..41: mol_type = other RNA
tgacctcgcccacagacttggcagcgccagtagaggcaggg

SEQ ID NO: 5524 - RNA, 40 nt, synthetic construct
  source 1..40: mol_type = other RNA
gttcagctcaaggacgaccttgcccaagccttggcagcgc

SEQ ID NO: 5525 - RNA, 41 nt, synthetic construct
  source 1..41: mol_type = other RNA
ccagtgagcttcccgttcagctcaggagtgacctcacccac

SEQ ID NO: 5526 - RNA, 41 nt, synthetic construct
  source 1..41: mol_type = other RNA
gttcagctcacggatgccgttgcccacatccttggcagcgc

SEQ ID NO: 5527 - RNA, 41 nt, synthetic construct
  source 1..41: mol_type = other RNA
tgaccacgaccacagccttggcagcgccagtagaggcaggg

SEQ ID NO: 5528 - RNA, 41 nt, synthetic construct
  source 1..41: mol_type = other RNA
ccagtgagcttcccgttcagctcagggtcaacctcacccac

SEQ ID NO: 5529 - RNA, 41 nt, synthetic construct
  source 1..41: mol_type = other RNA
cggccttgcacacagtcttggcagcgccagtagaggcaggg

SEQ ID NO: 5530 - RNA, 41 nt, synthetic construct
  source 1..41: mol_type = other RNA
tgacctcacccacagccttggcagcgccagtagaggcaggg

SEQ ID NO: 5531 - RNA, 41 nt, synthetic construct
  source 1..41: mol_type = other RNA
ccagtgagcttcccgttcagctaagggatgaccttgcccac

SEQ ID NO: 5532 - RNA, 41 nt, synthetic construct
  source 1..41: mol_type = other RNA
ccagtgagcttcccgttcagctcaggggtgaccttgcccac

SEQ ID NO: 5533 - RNA, 39 nt, synthetic construct
  source 1..39: mol_type = other RNA
ccagtgagcttcccgttcagcacggatgccgttgcccac

SEQ ID NO: 5534 - RNA, 41 nt, synthetic construct
  source 1..41: mol_type = other RNA
cgaccttgcccacagccttggcagcgccagtagaggcaggg

SEQ ID NO: 5535 - RNA, 41 nt, synthetic construct
  source 1..41: mol_type = other RNA
ccagtgagcttcccgttcagctcagggcggaccttgcccag

SEQ ID NO: 5536 - RNA, 41 nt, synthetic construct
  source 1..41: mol_type = other RNA
tgatctcacccacggctttggcagcgccagtagaggcaggg

SEQ ID NO: 5537 - RNA, 39 nt, synthetic construct
  source 1..39: mol_type = other RNA
accttgcccacggccttggcagcgccagtagaggcaggg

SEQ ID NO: 5538 - RNA, 41 nt, synthetic construct
  source 1..41: mol_type = other RNA
tgccctcgcccacagccttggcagcgccagtagaggcaggg

SEQ ID NO: 5539 - RNA, 41 nt, synthetic construct
  source 1..41: mol_type = other RNA
tggtcttgcccagaagcttggcagcgccagtagaggcaggg

SEQ ID NO: 5540 - RNA, 41 nt, synthetic construct
  source 1..41: mol_type = other RNA
gttcagctcagggacggccttgcacacagtcttggcagcgc

SEQ ID NO: 5541 - RNA, 41 nt, synthetic construct
  source 1..41: mol_type = other RNA
gttcagctcaaaaatgacatcgcccacggtcttggcagcgc

SEQ ID NO: 5542 - RNA, 41 nt, synthetic construct
  source 1..41: mol_type = other RNA
ccagtgagcttcccgttcaggtcggggctggccctgcccac

SEQ ID NO: 5543 - RNA, 41 nt, synthetic construct
  source 1..41: mol_type = other RNA
ccagtgagcttcccgttcagctcagggacaaccttatccac

SEQ ID NO: 5544 - RNA, 40 nt, synthetic construct
  source 1..40: mol_type = other RNA
ccagtgagcttcccgttcagctcacggatgaccttgccac

SEQ ID NO: 5545 - RNA, 42 nt, synthetic construct
  source 1..42: mol_type = other RNA
tgaccgttgcccacagccttggcagcgccagtagaggcaggg

SEQ ID NO: 5546 - RNA, 41 nt, synthetic construct
  source 1..41: mol_type = other RNA
ccagtgagcttcccgttcagcacagggatgaccttgcccac

SEQ ID NO: 5547 - RNA, 40 nt, synthetic construct
  source 1..40: mol_type = other RNA
ccagtgagcttcccgttcagctagggatgacttcacccac

SEQ ID NO: 5548 - RNA, 40 nt, synthetic construct
  source 1..40: mol_type = other RNA
gttcagctcagggatgatctcacccacagcttggcagcgc

SEQ ID NO: 5549 - RNA, 41 nt, synthetic construct
  source 1..41: mol_type = other RNA
ccagtgagcttcccgttcagttaagggatgacctcgccccc

SEQ ID NO: 5550 - RNA, 42 nt, synthetic construct
  source 1..42: mol_type = other RNA
tgaccccacccaccagccttggcagcgccagtagaggcaggg

SEQ ID NO: 5551 - RNA, 41 nt, synthetic construct
  source 1..41: mol_type = other RNA
gttcagctcagggatgacctcaaccccagccttggcagcgc

SEQ ID NO: 5552 - RNA, 41 nt, synthetic construct
  source 1..41: mol_type = other RNA
tgacctcgcccaaagccttagcagcgccagtagaggcaggg

SEQ ID NO: 5553 - RNA, 41 nt, synthetic construct
  source 1..41: mol_type = other RNA
tgacctttcccaccgccttggcagcgccagtagaggcaggg

SEQ ID NO: 5554 - RNA, 41 nt, synthetic construct
  source 1..41: mol_type = other RNA
ccagtgagcttcccgttcagctcagggatgtattcgcccac

SEQ ID NO: 5555 - RNA, 41 nt, synthetic construct
  source 1..41: mol_type = other RNA
tgaccatgaccacagccttggcagcgccagtagaggcaggg

SEQ ID NO: 5556 - RNA, 41 nt, synthetic construct
  source 1..41: mol_type = other RNA
tgacctcgcccacggccatgccagcgccagtagaggcaggg

SEQ ID NO: 5557 - RNA, 41 nt, synthetic construct
  source 1..41: mol_type = other RNA
gttcagctcagggatgacctagcctaccgtcttggcagcgc

SEQ ID NO: 5558 - RNA, 41 nt, synthetic construct
  source 1..41: mol_type = other RNA
ccagtgagcttcccgttcagctcaggggtgacctcgcacac

SEQ ID NO: 5559 - RNA, 42 nt, synthetic construct
  source 1..42: mol_type = other RNA
ccagtgagcttcccgttcagcatcagggctgacctcacccac

SEQ ID NO: 5560 - RNA, 41 nt, synthetic construct
  source 1..41: mol_type = other RNA
ccagtgagcttcccgttcagcccagacgagaccctgccctc

SEQ ID NO: 5561 - RNA, 42 nt, synthetic construct
  source 1..42: mol_type = other RNA
ccagtgagcttcccgttcaggtcagggatgacctcaccctac

SEQ ID NO: 5562 - RNA, 41 nt, synthetic construct
  source 1..41: mol_type = other RNA
ccagtgagcttcccgttcagttccgtaatgaccttgcccac

SEQ ID NO: 5563 - RNA, 41 nt, synthetic construct
  source 1..41: mol_type = other RNA
gttcagctcagggatggtcttgcccagaagcttggcagcgc

SEQ ID NO: 5564 - RNA, 41 nt, synthetic construct
  source 1..41: mol_type = other RNA
ccagtgagcttcccgttcagctaaggcatgaccttgcagac

SEQ ID NO: 5565 - RNA, 41 nt, synthetic construct
  source 1..41: mol_type = other RNA
gttcagctcagtaattaccctgccggtggccttggcagcgc

SEQ ID NO: 5566 - RNA, 41 nt, synthetic construct
  source 1..41: mol_type = other RNA
ccagtgagcttcccgttcagctcacggatgacctcgcagaa

SEQ ID NO: 5567 - RNA, 41 nt, synthetic construct
  source 1..41: mol_type = other RNA
ccagtgagcttcccgttcagctcagggctcaccttgcacac

SEQ ID NO: 5568 - RNA, 41 nt, synthetic construct
  source 1..41: mol_type = other RNA
tggcctcgcccacagccttggcagcgccagtagaggcaggg

SEQ ID NO: 5569 - RNA, 41 nt, synthetic construct
  source 1..41: mol_type = other RNA
ccagtgagcttcccgttcagctcagggatgccctcagccac

SEQ ID NO: 5570 - RNA, 41 nt, synthetic construct
  source 1..41: mol_type = other RNA
tgacctcacccaaagccttcgcagcgccagtagaggcaggg

SEQ ID NO: 5571 - RNA, 41 nt, synthetic construct
  source 1..41: mol_type = other RNA
ccagtgagcttcccgttcagctcaggatgaacttcacaaca

SEQ ID NO: 5572 - RNA, 41 nt, synthetic construct
  source 1..41: mol_type = other RNA
ccagtgagcttcccgttcagctcagggatgaaatcacccac

SEQ ID NO: 5573 - RNA, 41 nt, synthetic construct
  source 1..41: mol_type = other RNA
ccagtgagcttcccgttcagctctgggatgagcttgcccat

SEQ ID NO: 5574 - RNA, 42 nt, synthetic construct
  source 1..42: mol_type = other RNA
tgacttcaccctacagtcttggcagcgccagtagaggcaggg

SEQ ID NO: 5575 - RNA, 41 nt, synthetic construct
  source 1..41: mol_type = other RNA
gttcagctcagggctgcccttgcttacagcattggcagcgc

SEQ ID NO: 5576 - RNA, 41 nt, synthetic construct
  source 1..41: mol_type = other RNA
tgaccgcgcccacggccttggcagcgccagtagaggcaggg

SEQ ID NO: 5577 - RNA, 41 nt, synthetic construct
  source 1..41: mol_type = other RNA
ccagtgagcttcccgttcagcttaggcataacctcacccac

SEQ ID NO: 5578 - RNA, 41 nt, synthetic construct
  source 1..41: mol_type = other RNA
ccagtgagcttcccgttcagctcagggatggcctcgcacac

SEQ ID NO: 5579 - RNA, 41 nt, synthetic construct
  source 1..41: mol_type = other RNA
tgtcctcgcccaccgtcttggcagcgccagtagaggcaggg

SEQ ID NO: 5580 - RNA, 41 nt, synthetic construct
  source 1..41: mol_type = other RNA
tgacctcgcctaccgtcttggcagcgccagtagaggcaggg

SEQ ID NO: 5581 - RNA, 41 nt, synthetic construct
  source 1..41: mol_type = other RNA
ccagtgagcttcccgttcagctcagggctcacctcgcacac

SEQ ID NO: 5582 - RNA, 41 nt, synthetic construct
  source 1..41: mol_type = other RNA
tgacctcacccacagcattggcagcgccagtagaggcaggg

SEQ ID NO: 5583 - RNA, 37 nt, synthetic construct
  source 1..37: mol_type = other RNA
ccagtgagcttcccgttcagccaagggctttgccaaa

SEQ ID NO: 5584 - RNA, 43 nt, synthetic construct
  source 1..43: mol_type = other RNA
ccagtgagcttcccgttcagaggtcacggatgccctcgcccac

SEQ ID NO: 5585 - RNA, 39 nt, synthetic construct
  source 1..39: mol_type = other RNA
gttcagctcacggatgcccttgctcagctttggcagcgc

SEQ ID NO: 5586 - RNA, 41 nt, synthetic construct
  source 1..41: mol_type = other RNA
ccagtgagcttcccgttcagatcaggaacgaacttgcccac

SEQ ID NO: 5587 - RNA, 47 nt, synthetic construct
  source 1..47: mol_type = other RNA
ccagtgagcttcccgttcagctctttctttccaggaacctcgcccac

SEQ ID NO: 5588 - RNA, 41 nt, synthetic construct
  source 1..41: mol_type = other RNA
ccagtgagcttcccgttcagaacagggacgaccttgcccac

SEQ ID NO: 5589 - RNA, 41 nt, synthetic construct
  source 1..41: mol_type = other RNA
tgacctcgcccacagccttggcagcgccagtagaggcaggg

SEQ ID NO: 5590 - RNA, 41 nt, synthetic construct
  source 1..41: mol_type = other RNA
tgacctcgaccatagccttgacagcgccagtagaggcaggg

SEQ ID NO: 5591 - RNA, 41 nt, synthetic construct
  source 1..41: mol_type = other RNA
ccagtgagcttcccgttcagctccgggttgacctcaccctc

SEQ ID NO: 5592 - RNA, 42 nt, synthetic construct
  source 1..42: mol_type = other RNA
ccagtgagcttcccgttcagctcaggactgacttcaccctac

SEQ ID NO: 5593 - RNA, 43 nt, synthetic construct
  source 1..43: mol_type = other RNA
ccagtgagcttcccgttcagctaaggccgatgacctcacccac

SEQ ID NO: 5594 - RNA, 41 nt, synthetic construct
  source 1..41: mol_type = other RNA
ccagtgagcttcccgttcagctcagggctgcccttgcttac

SEQ ID NO: 5595 - RNA, 41 nt, synthetic construct
  source 1..41: mol_type = other RNA
cggcctcgcacacagtcttggcagcgccagtagaggcaggg

SEQ ID NO: 5596 - RNA, 41 nt, synthetic construct
  source 1..41: mol_type = other RNA
ccagtgagcttcccgttcagctcgggagtgaccttgccaac

SEQ ID NO: 5597 - RNA, 41 nt, synthetic construct
  source 1..41: mol_type = other RNA
tgagctcgcccacagccttagcagcgccagtagaggcaggg

SEQ ID NO: 5598 - RNA, 40 nt, synthetic construct
  source 1..40: mol_type = other RNA
tgacctcgctcacagattggcagcgccagtagaggcaggg

SEQ ID NO: 5599 - RNA, 41 nt, synthetic construct
  source 1..41: mol_type = other RNA
ccagtgagcttcccgttcagctcacggatgacctggcccac

SEQ ID NO: 5600 - RNA, 41 nt, synthetic construct
  source 1..41: mol_type = other RNA
ttcgtatatacacagccttggcagcgccagtagaggcaggg

SEQ ID NO: 5601 - RNA, 49 nt, synthetic construct
  source 1..49: mol_type = other RNA
gttcagctcaaaggatgacctcgcccccagccgtgaggcttggcagcgc

SEQ ID NO: 5602 - RNA, 39 nt, synthetic construct
  source 1..39: mol_type = other RNA
acctcgcccacggccttggcagcgccagtagaggcaggg

SEQ ID NO: 5603 - RNA, 41 nt, synthetic construct
  source 1..41: mol_type = other RNA
taacctcacccacagccttggcagcgccagtagaggcaggg

SEQ ID NO: 5604 - RNA, 41 nt, synthetic construct
  source 1..41: mol_type = other RNA
ggacctcgcccagcgccttgacagcgccagtagaggcaggg

SEQ ID NO: 5605 - RNA, 41 nt, synthetic construct
  source 1..41: mol_type = other RNA
tgacctcgcccacagcattggcagcgccagtagaggcaggg

SEQ ID NO: 5606 - RNA, 41 nt, synthetic construct
  source 1..41: mol_type = other RNA
tggcctcgcccacataattggcagcgccagtagaggcaggg

SEQ ID NO: 5607 - RNA, 41 nt, synthetic construct
  source 1..41: mol_type = other RNA
tgacctcacacacaggcttggcagcgccagtagaggcaggg

SEQ ID NO: 5608 - RNA, 41 nt, synthetic construct
  source 1..41: mol_type = other RNA
ccagtgagcttcccgttcagctcctatctgaccccagccac

SEQ ID NO: 5609 - RNA, 41 nt, synthetic construct
  source 1..41: mol_type = other RNA
cgacctcacccacagcctgggcagcgccagtagaggcaggg

SEQ ID NO: 5610 - RNA, 41 nt, synthetic construct
  source 1..41: mol_type = other RNA
tgatctcacccacagatttgccagcgccagtagaggcaggg

SEQ ID NO: 5611 - RNA, 41 nt, synthetic construct
  source 1..41: mol_type = other RNA
tggcctcgcacacagcttgggcagcgccagtagaggcaggg

SEQ ID NO: 5612 - RNA, 41 nt, synthetic construct
  source 1..41: mol_type = other RNA
tgaccttacccacaaaagtggcagcgccagtagaggcaggg

SEQ ID NO: 5613 - RNA, 41 nt, synthetic construct
  source 1..41: mol_type = other RNA
ccagtgagcttcccgttcagctcagggatgtcctctcccac

SEQ ID NO: 5614 - RNA, 41 nt, synthetic construct
  source 1..41: mol_type = other RNA
gttcagctcagggacaacctcatccaccgccttggcagcgc

SEQ ID NO: 5615 - RNA, 40 nt, synthetic construct
  source 1..40: mol_type = other RNA
ccagtgagcttcccgttcagctcagggctgtggcgcccac

SEQ ID NO: 5616 - RNA, 41 nt, synthetic construct
  source 1..41: mol_type = other RNA
taaccttgcctacagctatggcagcgccagtagaggcaggg

SEQ ID NO: 5617 - RNA, 40 nt, synthetic construct
  source 1..40: mol_type = other RNA
ccagtgagcttcccgttcagtcagggacgacctcacccac

SEQ ID NO: 5618 - RNA, 41 nt, synthetic construct
  source 1..41: mol_type = other RNA
tgacctggcccacagccttgccagcgccagtagaggcaggg

SEQ ID NO: 5619 - RNA, 41 nt, synthetic construct
  source 1..41: mol_type = other RNA
tggtctcacccatagcctcggcagcgccagtagaggcaggg

SEQ ID NO: 5620 - RNA, 41 nt, synthetic construct
  source 1..41: mol_type = other RNA
ccagtgagcttcccgttcagctcagggacaacctcatccac

SEQ ID NO: 5621 - RNA, 41 nt, synthetic construct
  source 1..41: mol_type = other RNA
caaccttatccaccgccttggcagcgccagtagaggcaggg

SEQ ID NO: 5622 - RNA, 41 nt, synthetic construct
  source 1..41: mol_type = other RNA
ccagtgagcttcccgttcagctcggggaaaaccgcacccac

SEQ ID NO: 5623 - RNA, 41 nt, synthetic construct
  source 1..41: mol_type = other RNA
agaccctgccctcagcttaggcagcgccagtagaggcaggg

SEQ ID NO: 5624 - RNA, 41 nt, synthetic construct
  source 1..41: mol_type = other RNA
gttcagctcagggatgaccgcgcccacggccttggcagcgc

SEQ ID NO: 5625 - RNA, 41 nt, synthetic construct
  source 1..41: mol_type = other RNA
ccagtgagcttcccgttcagctcagggctgaccatgaccac

SEQ ID NO: 5626 - RNA, 41 nt, synthetic construct
  source 1..41: mol_type = other RNA
tgcactcgcccctagccttggcagcgccagtagaggcaggg

SEQ ID NO: 5627 - RNA, 41 nt, synthetic construct
  source 1..41: mol_type = other RNA
ccagtgagcttcccgttcagctcagggatgaacacacccac

SEQ ID NO: 5628 - RNA, 41 nt, synthetic construct
  source 1..41: mol_type = other RNA
ccagtgagcttcccgttcagcacagggttgacttcataaaa

SEQ ID NO: 5629 - RNA, 41 nt, synthetic construct
  source 1..41: mol_type = other RNA
tgtttgtgccctccgccttggcagcgccagtagaggcaggg

SEQ ID NO: 5630 - RNA, 41 nt, synthetic construct
  source 1..41: mol_type = other RNA
ccagtgagcttcccgttcagctcaggcatgaccctgccaac

SEQ ID NO: 5631 - RNA, 41 nt, synthetic construct
  source 1..41: mol_type = other RNA
ccagtgagcttcccgttcagcccagggatgacctcgaccat

SEQ ID NO: 5632 - RNA, 41 nt, synthetic construct
  source 1..41: mol_type = other RNA
tgacctcgcccacagtttcggcagcgccagtagaggcaggg

SEQ ID NO: 5633 - RNA, 40 nt, synthetic construct
  source 1..40: mol_type = other RNA
ccagtgagcttcccgttcagtcagggatgacatcgcccat

SEQ ID NO: 5634 - RNA, 41 nt, synthetic construct
  source 1..41: mol_type = other RNA
ctacctcgcccacagccttggcagcgccagtagaggcaggg

SEQ ID NO: 5635 - RNA, 41 nt, synthetic construct
  source 1..41: mol_type = other RNA
ccagtgagcttcccgttcagctcagggatgacctcgtccac

SEQ ID NO: 5636 - RNA, 42 nt, synthetic construct
  source 1..42: mol_type = other RNA
tgaccgtcgcccacagccttggcagcgccagtagaggcaggg

SEQ ID NO: 5637 - RNA, 41 nt, synthetic construct
  source 1..41: mol_type = other RNA
tgacatcgcccacggtcttggcagcgccagtagaggcaggg

SEQ ID NO: 5638 - RNA, 40 nt, synthetic construct
  source 1..40: mol_type = other RNA
ccagtgagcttcccgttcagtcaggggtgacctcacccac

SEQ ID NO: 5639 - RNA, 42 nt, synthetic construct
  source 1..42: mol_type = other RNA
tgaccctacccaccagccttggcagcgccagtagaggcaggg

SEQ ID NO: 5640 - RNA, 41 nt, synthetic construct
  source 1..41: mol_type = other RNA
tgagctcgcccatggccttaacagcgccagtagaggcaggg

SEQ ID NO: 5641 - RNA, 41 nt, synthetic construct
  source 1..41: mol_type = other RNA
tgatatcgcccaccgtcttggcagcgccagtagaggcaggg

SEQ ID NO: 5642 - RNA, 41 nt, synthetic construct
  source 1..41: mol_type = other RNA
tgacctcgcccacaaccttggcagcgccagtagaggcaggg

SEQ ID NO: 5643 - RNA, 41 nt, synthetic construct
  source 1..41: mol_type = other RNA
gttcagctcacggatgacctggcccacagccttggcagcgc

SEQ ID NO: 5644 - RNA, 41 nt, synthetic construct
  source 1..41: mol_type = other RNA
tgaactcgctcacagactttgcagcgccagtagaggcaggg

SEQ ID NO: 5645 - RNA, 49 nt, synthetic construct
  source 1..49: mol_type = other RNA
gttcagctcagggatgacctgacagtcaccctgccctcattggcagcgc

SEQ ID NO: 5646 - RNA, 41 nt, synthetic construct
  source 1..41: mol_type = other RNA
tgacctcacacacaaccttggcagcgccagtagaggcaggg

SEQ ID NO: 5647 - RNA, 44 nt, synthetic construct
  source 1..44: mol_type = other RNA
gttcagctcaggtctgaccccacccacgcagttcttggcagcgc

SEQ ID NO: 5648 - RNA, 40 nt, synthetic construct
  source 1..40: mol_type = other RNA
ccagtgagcttcccgttcagtcagggctgacctcaccaac

SEQ ID NO: 5649 - RNA, 41 nt, synthetic construct
  source 1..41: mol_type = other RNA
gttcagctcagggatgtttgcgccctccgccttggcagcgc

SEQ ID NO: 5650 - RNA, 41 nt, synthetic construct
  source 1..41: mol_type = other RNA
gttcagctcagggctggccctgcccgtagcgttggcagcgc

SEQ ID NO: 5651 - RNA, 41 nt, synthetic construct
  source 1..41: mol_type = other RNA
aaaccgtacccacagcctcggcagcgccagtagaggcaggg

SEQ ID NO: 5652 - RNA, 42 nt, synthetic construct
  source 1..42: mol_type = other RNA
tgacttcacccacatgccttggcagcgccagtagaggcaggg

SEQ ID NO: 5653 - RNA, 41 nt, synthetic construct
  source 1..41: mol_type = other RNA
ccagtgagcttcccgttcagctcagggctgacctcgcgtac

SEQ ID NO: 5654 - RNA, 41 nt, synthetic construct
  source 1..41: mol_type = other RNA
tgacctcgccgacagccttagcagcgccagtagaggcaggg

SEQ ID NO: 5655 - RNA, 37 nt, synthetic construct
  source 1..37: mol_type = other RNA
ccagtgagcttcccgttcagccaagggcttcgccaaa

SEQ ID NO: 5656 - RNA, 40 nt, synthetic construct
  source 1..40: mol_type = other RNA
ccagtgagcttcccgttcagctagggacgacctcacccac

SEQ ID NO: 5657 - RNA, 41 nt, synthetic construct
  source 1..41: mol_type = other RNA
tgccctcagccacagccttggcagcgccagtagaggcaggg

SEQ ID NO: 5658 - RNA, 41 nt, synthetic construct
  source 1..41: mol_type = other RNA
tggcgtcacccagaaccttggcagcgccagtagaggcaggg

SEQ ID NO: 5659 - RNA, 41 nt, synthetic construct
  source 1..41: mol_type = other RNA
tggcgttacccagaaccttggcagcgccagtagaggcaggg

SEQ ID NO: 5660 - RNA, 41 nt, synthetic construct
  source 1..41: mol_type = other RNA
gttcagctcagggattcgtatatacacagccttggcagcgc

SEQ ID NO: 5661 - RNA, 42 nt, synthetic construct
  source 1..42: mol_type = other RNA
tgacttcgcccacagcccttggcagcgccagtagaggcaggg

SEQ ID NO: 5662 - RNA, 38 nt, synthetic construct
  source 1..38: mol_type = other RNA
gttcagctcaggaaccttgcccacggccttggcagcgc

SEQ ID NO: 5663 - RNA, 41 nt, synthetic construct
  source 1..41: mol_type = other RNA
ccagtgagcttcccgttcagctaaggcatgacctcgcagac

SEQ ID NO: 5664 - RNA, 41 nt, synthetic construct
  source 1..41: mol_type = other RNA
ccagtgagcttcccgttcagctcagggctgacctctcccac

SEQ ID NO: 5665 - RNA, 41 nt, synthetic construct
  source 1..41: mol_type = other RNA
tgacctcgccccccgccttggcagcgccagtagaggcaggg

SEQ ID NO: 5666 - RNA, 41 nt, synthetic construct
  source 1..41: mol_type = other RNA
ccagtgagcttcccgttcagctcagggatgcccttagccac

SEQ ID NO: 5667 - RNA, 41 nt, synthetic construct
  source 1..41: mol_type = other RNA
gttcagctcagggatgtcctttcccacagcattggcagcgc

SEQ ID NO: 5668 - RNA, 41 nt, synthetic construct
  source 1..41: mol_type = other RNA
tgaacttgcccccagcgttggcagcgccagtagaggcaggg

SEQ ID NO: 5669 - RNA, 41 nt, synthetic construct
  source 1..41: mol_type = other RNA
tgacctcgcccacacccttgacagcgccagtagaggcaggg

SEQ ID NO: 5670 - RNA, 41 nt, synthetic construct
  source 1..41: mol_type = other RNA
tgacctcgcccacagtcttagcagcgccagtagaggcaggg

SEQ ID NO: 5671 - RNA, 42 nt, synthetic construct
  source 1..42: mol_type = other RNA
tggcgcccacgtctaccttcggcagcgccagtagaggcaggg

SEQ ID NO: 5672 - RNA, 41 nt, synthetic construct
  source 1..41: mol_type = other RNA
gttcagctcagggctcaccttgcacacagccttggcagcgc

SEQ ID NO: 5673 - RNA, 41 nt, synthetic construct
  source 1..41: mol_type = other RNA
ccagtgagcttcccgttcagcggagggatgacctcacccac

SEQ ID NO: 5674 - RNA, 41 nt, synthetic construct
  source 1..41: mol_type = other RNA
tgacctctagcacggccttggcagcgccagtagaggcaggg

SEQ ID NO: 5675 - RNA, 41 nt, synthetic construct
  source 1..41: mol_type = other RNA
tgacctcgcctacagctggggcagcgccagtagaggcaggg

SEQ ID NO: 5676 - RNA, 41 nt, synthetic construct
  source 1..41: mol_type = other RNA
tgaccccgcccacagccttagcagcgccagtagaggcaggg

SEQ ID NO: 5677 - RNA, 41 nt, synthetic construct
  source 1..41: mol_type = other RNA
ccagtgagcttcccgttcagctcagggatgaccttgcccag

SEQ ID NO: 5678 - RNA, 41 nt, synthetic construct
  source 1..41: mol_type = other RNA
tggccttgcccacagccttggcagcgccagtagaggcaggg

SEQ ID NO: 5679 - RNA, 41 nt, synthetic construct
  source 1..41: mol_type = other RNA
ccagtgagcttcccgttcagcttggtaattaccccgccgat

SEQ ID NO: 5680 - RNA, 41 nt, synthetic construct
  source 1..41: mol_type = other RNA
tgacctcgcccacagccttgccagcgccagtagaggcaggg

SEQ ID NO: 5681 - RNA, 41 nt, synthetic construct
  source 1..41: mol_type = other RNA
tgtcttcgcccacagccttagcagcgccagtagaggcaggg

SEQ ID NO: 5682 - RNA, 41 nt, synthetic construct
  source 1..41: mol_type = other RNA
gttcagctcagggatgtttgtgccctccgccttggcagcgc

SEQ ID NO: 5683 - RNA, 41 nt, synthetic construct
  source 1..41: mol_type = other RNA
tgaccttgcccacagtttcggcagcgccagtagaggcaggg

SEQ ID NO: 5684 - RNA, 41 nt, synthetic construct
  source 1..41: mol_type = other RNA
ccagtgagcttcccgttcagctcaggaatgatatcgcccaa

SEQ ID NO: 5685 - RNA, 41 nt, synthetic construct
  source 1..41: mol_type = other RNA
tgacttcgcccacgtcattaccagcgccagtagaggcaggg

SEQ ID NO: 5686 - RNA, 41 nt, synthetic construct
  source 1..41: mol_type = other RNA
gttcagctcaggaatgaaatcacccaccggcttggcagcgc

SEQ ID NO: 5687 - RNA, 41 nt, synthetic construct
  source 1..41: mol_type = other RNA
ccagtgagcttcccgttcagcacagggataaccttgcctac

SEQ ID NO: 5688 - RNA, 38 nt, synthetic construct
  source 1..38: mol_type = other RNA
gttcagctcaggaacctcgcccacggccttggcagcgc

SEQ ID NO: 5689 - RNA, 41 nt, synthetic construct
  source 1..41: mol_type = other RNA
tgcccttgcccacagccttggcagcgccagtagaggcaggg

SEQ ID NO: 5690 - RNA, 41 nt, synthetic construct
  source 1..41: mol_type = other RNA
gttcagctcagggatgtattggcccacagccttggcagcgc

SEQ ID NO: 5691 - RNA, 41 nt, synthetic construct
  source 1..41: mol_type = other RNA
tgaccttgcccacagtcttaacagcgccagtagaggcaggg

SEQ ID NO: 5692 - RNA, 41 nt, synthetic construct
  source 1..41: mol_type = other RNA
ccagtgagcttcccgttcagcttggtaattaccctgccgat

SEQ ID NO: 5693 - RNA, 48 nt, synthetic construct
  source 1..48: mol_type = other RNA
tgacctgacagtcaccctgccctcatgccagcgccagtagaggcaggg

SEQ ID NO: 5694 - RNA, 43 nt, synthetic construct
  source 1..43: mol_type = other RNA
tgccgcctcgcccacggccttggcagcgccagtagaggcaggg

SEQ ID NO: 5695 - RNA, 41 nt, synthetic construct
  source 1..41: mol_type = other RNA
tgaccttacacacaaccttggcagcgccagtagaggcaggg

SEQ ID NO: 5696 - RNA, 41 nt, synthetic construct
  source 1..41: mol_type = other RNA
gttcagctcagggcggaccttgcccagcgccttggcagcgc

SEQ ID NO: 5697 - RNA, 41 nt, synthetic construct
  source 1..41: mol_type = other RNA
gttcagctcagggatgaacacacccacagccttggcagcgc

SEQ ID NO: 5698 - RNA, 40 nt, synthetic construct
  source 1..40: mol_type = other RNA
ccagtgagcttcccgttcagttcaaggacgaccttgccca

SEQ ID NO: 5699 - RNA, 41 nt, synthetic construct
  source 1..41: mol_type = other RNA
gttcagctcaaaaatgacattgcccacggtcttggcagcgc

SEQ ID NO: 5700 - RNA, 41 nt, synthetic construct
  source 1..41: mol_type = other RNA
ccagtgagcttcccgttcagctcagggatgtctgcgccctc

SEQ ID NO: 5701 - RNA, 41 nt, synthetic construct
  source 1..41: mol_type = other RNA
tgtcctctcccacagcactggcagcgccagtagaggcaggg

SEQ ID NO: 5702 - RNA, 41 nt, synthetic construct
  source 1..41: mol_type = other RNA
tgacctcgcccacagcctgggcagcgccagtagaggcaggg

SEQ ID NO: 5703 - RNA, 41 nt, synthetic construct
  source 1..41: mol_type = other RNA
tgacctagcctaccgtcttggcagcgccagtagaggcaggg

SEQ ID NO: 5704 - RNA, 41 nt, synthetic construct
  source 1..41: mol_type = other RNA
ccagtgagcttcccgttcagctcagggctgtggcgccccac

SEQ ID NO: 5705 - RNA, 41 nt, synthetic construct
  source 1..41: mol_type = other RNA
ccagtgagcttcccgttcagctaagggatgacctttcccac

SEQ ID NO: 5706 - RNA, 41 nt, synthetic construct
  source 1..41: mol_type = other RNA
ccagtgagcttcccgttcagttaagggatgaccttgccccc

SEQ ID NO: 5707 - RNA, 41 nt, synthetic construct
  source 1..41: mol_type = other RNA
tgatctcgcccacgacgttggcagcgccagtagaggcaggg

SEQ ID NO: 5708 - RNA, 40 nt, synthetic construct
  source 1..40: mol_type = other RNA
tgccgtcgcccacatcctggcagcgccagtagaggcaggg

SEQ ID NO: 5709 - RNA, 45 nt, synthetic construct
  source 1..45: mol_type = other RNA
gttcagctcacggatgatattgagtgcccacagccttggcagcgc

SEQ ID NO: 5710 - RNA, 41 nt, synthetic construct
  source 1..41: mol_type = other RNA
ccagtgagcttcccgttcaggtcaaggatgacctcaccaac

SEQ ID NO: 5711 - RNA, 41 nt, synthetic construct
  source 1..41: mol_type = other RNA
tgacctcgcccacagccttaccagcgccagtagaggcaggg

SEQ ID NO: 5712 - RNA, 41 nt, synthetic construct
  source 1..41: mol_type = other RNA
tgacctcacccacagccttttcagcgccagtagaggcaggg

SEQ ID NO: 5713 - RNA, 52 nt, synthetic construct
  source 1..52: mol_type = other RNA
ccagtgagcttcccgttcagctcagggatgacctgacagtcaccccgccctc

SEQ ID NO: 5714 - RNA, 41 nt, synthetic construct
  source 1..41: mol_type = other RNA
ccagtgagcttcccgttcagctcagggatgaccgtgcccac

SEQ ID NO: 5715 - RNA, 40 nt, synthetic construct
  source 1..40: mol_type = other RNA
tgaccttgccacagccttgccagcgccagtagaggcaggg

SEQ ID NO: 5716 - RNA, 41 nt, synthetic construct
  source 1..41: mol_type = other RNA
gttcagctcagggatgacctcgtccacagctttggcagcgc

SEQ ID NO: 5717 - RNA, 41 nt, synthetic construct
  source 1..41: mol_type = other RNA
ttaccctgccggtggccttggcagcgccagtagaggcaggg

SEQ ID NO: 5718 - RNA, 41 nt, synthetic construct
  source 1..41: mol_type = other RNA
tgacctcgccgaccgcgttaacagcgccagtagaggcaggg

SEQ ID NO: 5719 - RNA, 41 nt, synthetic construct
  source 1..41: mol_type = other RNA
taaccttgcccacagctttggcagcgccagtagaggcaggg

SEQ ID NO: 5720 - RNA, 41 nt, synthetic construct
  source 1..41: mol_type = other RNA
tggcctcgcccacatccttgccagcgccagtagaggcaggg

SEQ ID NO: 5721 - RNA, 41 nt, synthetic construct
  source 1..41: mol_type = other RNA
gttcagctcacggatgaccttgcagaatgccttggcagcgc

SEQ ID NO: 5722 - RNA, 41 nt, synthetic construct
  source 1..41: mol_type = other RNA
ccagtgagcttcccgttcagtgtagggacggccttgcacac

SEQ ID NO: 5723 - RNA, 41 nt, synthetic construct
  source 1..41: mol_type = other RNA
tgacctcgcccgccgccttggcagcgccagtagaggcaggg

SEQ ID NO: 5724 - RNA, 41 nt, synthetic construct
  source 1..41: mol_type = other RNA
ccagtgagcttcccgttcagctctaaaatgacattgcccac

SEQ ID NO: 5725 - RNA, 41 nt, synthetic construct
  source 1..41: mol_type = other RNA
gttcagctcaggatgaacttcacaacaagcgttggcagcgc

SEQ ID NO: 5726 - RNA, 41 nt, synthetic construct
  source 1..41: mol_type = other RNA
tgaccttgctaacagccctgtcagcgccagtagaggcaggg

SEQ ID NO: 5727 - RNA, 41 nt, synthetic construct
  source 1..41: mol_type = other RNA
gttcagctcagggatgacctccccattggccttggcagcgc

SEQ ID NO: 5728 - RNA, 41 nt, synthetic construct
  source 1..41: mol_type = other RNA
agaccccgccctcagcttaggcagcgccagtagaggcaggg

SEQ ID NO: 5729 - RNA, 41 nt, synthetic construct
  source 1..41: mol_type = other RNA
tgaccccagccacagccttagcagcgccagtagaggcaggg

SEQ ID NO: 5730 - RNA, 41 nt, synthetic construct
  source 1..41: mol_type = other RNA
taacctcacacacagcctttgcagcgccagtagaggcaggg

SEQ ID NO: 5731 - RNA, 39 nt, synthetic construct
  source 1..39: mol_type = other RNA
tgcccttgctcagctttttcagcgccagtagaggcaggg

SEQ ID NO: 5732 - RNA, 41 nt, synthetic construct
  source 1..41: mol_type = other RNA
tgacctcgtccacagctttggcagcgccagtagaggcaggg

SEQ ID NO: 5733 - RNA, 41 nt, synthetic construct
  source 1..41: mol_type = other RNA
gttcagctcagggctgaccatgaccacagccttggcagcgc

SEQ ID NO: 5734 - RNA, 41 nt, synthetic construct
  source 1..41: mol_type = other RNA
tgacctcacccacagccttctcagcgccagtagaggcaggg

SEQ ID NO: 5735 - RNA, 41 nt, synthetic construct
  source 1..41: mol_type = other RNA
tggtctcgccgccagccttggcagcgccagtagaggcaggg

SEQ ID NO: 5736 - RNA, 41 nt, synthetic construct
  source 1..41: mol_type = other RNA
tgtctccgcccacagccttagcagcgccagtagaggcaggg

SEQ ID NO: 5737 - RNA, 41 nt, synthetic construct
  source 1..41: mol_type = other RNA
tgacctccccgaaagccttggcagcgccagtagaggcaggg

SEQ ID NO: 5738 - RNA, 41 nt, synthetic construct
  source 1..41: mol_type = other RNA
tgacctcgctaacagccctgtcagcgccagtagaggcaggg

SEQ ID NO: 5739 - RNA, 46 nt, synthetic construct
  source 1..46: mol_type = other RNA
cgacctcacccaccgcctagccttgccagcgccagtagaggcaggg

SEQ ID NO: 5740 - RNA, 41 nt, synthetic construct
  source 1..41: mol_type = other RNA
tgaccttgcccacagcattggcagcgccagtagaggcaggg

SEQ ID NO: 5741 - RNA, 41 nt, synthetic construct
  source 1..41: mol_type = other RNA
ccagtgagcttcccgttcagctcagggatgacctcaacccc

SEQ ID NO: 5742 - RNA, 37 nt, synthetic construct
  source 1..37: mol_type = other RNA
tgaccccgcccacgttgcagcgccagtagaggcaggg

SEQ ID NO: 5743 - RNA, 41 nt, synthetic construct
  source 1..41: mol_type = other RNA
tgacctcgcccccagcattggcagcgccagtagaggcaggg

SEQ ID NO: 5744 - RNA, 41 nt, synthetic construct
  source 1..41: mol_type = other RNA
tgacctcgcccacactcttggcagcgccagtagaggcaggg

SEQ ID NO: 5745 - RNA, 38 nt, synthetic construct
  source 1..38: mol_type = other RNA
cttcgccaaaatgcttggcagcgccagtagaggcaggg

SEQ ID NO: 5746 - RNA, 37 nt, synthetic construct
  source 1..37: mol_type = other RNA
gttcagctcagggctttgccaaaatgcttggcagcgc

SEQ ID NO: 5747 - RNA, 45 nt, synthetic construct
  source 1..45: mol_type = other RNA
tgatattgagcgcccacagccttgccagcgccagtagaggcaggg

SEQ ID NO: 5748 - RNA, 41 nt, synthetic construct
  source 1..41: mol_type = other RNA
ccagtgagcttcccgttcagctcagggctgaccacgaccac

SEQ ID NO: 5749 - RNA, 41 nt, synthetic construct
  source 1..41: mol_type = other RNA
ccagtgagcttcccgttcagctcagggatggccttgcacac

SEQ ID NO: 5750 - RNA, 48 nt, synthetic construct
  source 1..48: mol_type = other RNA
ccagtgagcttcccgttcagcgaagggcaatggtgccgcctcgcccac

SEQ ID NO: 5751 - RNA, 41 nt, synthetic construct
  source 1..41: mol_type = other RNA
ccagtgagcttcccgttcagctcagggatgacctcacacac

SEQ ID NO: 5752 - RNA, 40 nt, synthetic construct
  source 1..40: mol_type = other RNA
tgatctcgccatagccttggcagcgccagtagaggcaggg

SEQ ID NO: 5753 - RNA, 41 nt, synthetic construct
  source 1..41: mol_type = other RNA
gttcagctcagggttgacttcataaaacgcgttggcagcgc

SEQ ID NO: 5754 - RNA, 41 nt, synthetic construct
  source 1..41: mol_type = other RNA
gttcagctcagggatgacctccccgaaagccttggcagcgc

SEQ ID NO: 5755 - RNA, 41 nt, synthetic construct
  source 1..41: mol_type = other RNA
tgacctcgcccacagccttagcagcgccagtagaggcaggg

SEQ ID NO: 5756 - RNA, 41 nt, synthetic construct
  source 1..41: mol_type = other RNA
gttcagctcagggatgaccttcccattggccttggcagcgc

SEQ ID NO: 5757 - RNA, 41 nt, synthetic construct
  source 1..41: mol_type = other RNA
gttcagctcagggacaaccttatccaccgccttggcagcgc

SEQ ID NO: 5758 - RNA, 42 nt, synthetic construct
  source 1..42: mol_type = other RNA
taacttcaccctacagtcgtggcagcgccagtagaggcaggg

SEQ ID NO: 5759 - RNA, 41 nt, synthetic construct
  source 1..41: mol_type = other RNA
tcacctcgcacacagcctttgcagcgccagtagaggcaggg

SEQ ID NO: 5760 - RNA, 41 nt, synthetic construct
  source 1..41: mol_type = other RNA
ccagtgagcttcccgttcagctcaggactaacctcacccac

SEQ ID NO: 5761 - RNA, 41 nt, synthetic construct
  source 1..41: mol_type = other RNA
tgaccttgcccccagcattggcagcgccagtagaggcaggg

SEQ ID NO: 5762 - RNA, 45 nt, synthetic construct
  source 1..45: mol_type = other RNA
ccagtgagcttcccgttcagccaacggatgacattgagcgcccac

SEQ ID NO: 5763 - RNA, 39 nt, synthetic construct
  source 1..39: mol_type = other RNA
ccagtgagcttcccgttcagatcacggatgcccttgccc

SEQ ID NO: 5764 - RNA, 41 nt, synthetic construct
  source 1..41: mol_type = other RNA
gttcagctcagggctgacctctagcacggccttggcagcgc

SEQ ID NO: 5765 - RNA, 40 nt, synthetic construct
  source 1..40: mol_type = other RNA
tgacctcgccacagccttgccagcgccagtagaggcaggg

SEQ ID NO: 5766 - RNA, 41 nt, synthetic construct
  source 1..41: mol_type = other RNA
ccagtgagcttcccgttcagctcagagatgacctcaaacac

SEQ ID NO: 5767 - RNA, 41 nt, synthetic construct
  source 1..41: mol_type = other RNA
tggccttgcacacagcttgggcagcgccagtagaggcaggg

SEQ ID NO: 5768 - RNA, 41 nt, synthetic construct
  source 1..41: mol_type = other RNA
tggcctcgcccacaaccttgccagcgccagtagaggcaggg

SEQ ID NO: 5769 - RNA, 41 nt, synthetic construct
  source 1..41: mol_type = other RNA
ttacctcgcccccagccttggcagcgccagtagaggcaggg

SEQ ID NO: 5770 - RNA, 41 nt, synthetic construct
  source 1..41: mol_type = other RNA
tgacctcgcccccagccttggcagcgccagtagaggcaggg

SEQ ID NO: 5771 - RNA, 41 nt, synthetic construct
  source 1..41: mol_type = other RNA
ccagtgagcttcccgttcagctcagggatgacgtcgccgaa

SEQ ID NO: 5772 - RNA, 40 nt, synthetic construct
  source 1..40: mol_type = other RNA
cgacctcgcccaagccttggcagcgccagtagaggcaggg

SEQ ID NO: 5773 - RNA, 41 nt, synthetic construct
  source 1..41: mol_type = other RNA
tgacttcataaaacgcgttggcagcgccagtagaggcaggg

SEQ ID NO: 5774 - RNA, 41 nt, synthetic construct
  source 1..41: mol_type = other RNA
tggccctgcccgtagcgttggcagcgccagtagaggcaggg

SEQ ID NO: 5775 - RNA, 41 nt, synthetic construct
  source 1..41: mol_type = other RNA
tgaccttcccattggccttggcagcgccagtagaggcaggg

SEQ ID NO: 5776 - RNA, 48 nt, synthetic construct
  source 1..48: mol_type = other RNA
tgacatcgcccacagccttctgcggacgcagcgccagtagaggcaggg

SEQ ID NO: 5777 - RNA, 41 nt, synthetic construct
  source 1..41: mol_type = other RNA
tgagcttgcccatggccttaacagcgccagtagaggcaggg

SEQ ID NO: 5778 - RNA, 41 nt, synthetic construct
  source 1..41: mol_type = other RNA
tgacctcgcccacagccttgtcagcgccagtagaggcaggg

SEQ ID NO: 5779 - RNA, 41 nt, synthetic construct
  source 1..41: mol_type = other RNA
ccagtgagcttcccgttcagctcaggaatgaaatcacccac

SEQ ID NO: 5780 - RNA, 40 nt, synthetic construct
  source 1..40: mol_type = other RNA
tgccgttgcccacatcctggcagcgccagtagaggcaggg

SEQ ID NO: 5781 - RNA, 47 nt, synthetic construct
  source 1..47: mol_type = other RNA
ccagtgagcttcccgttcagctctttctttccaggaaccttgcccac

SEQ ID NO: 5782 - RNA, 41 nt, synthetic construct
  source 1..41: mol_type = other RNA
ccagtgagcttcccgttcagctcagggctgacctctagcac

SEQ ID NO: 5783 - RNA, 41 nt, synthetic construct
  source 1..41: mol_type = other RNA
ttaccccgccggtggccttggcagcgccagtagaggcaggg

SEQ ID NO: 5784 - RNA, 41 nt, synthetic construct
  source 1..41: mol_type = other RNA
ccagtgagcttcccgttcagctcagggatgaacatacccac

SEQ ID NO: 5785 - RNA, 40 nt, synthetic construct
  source 1..40: mol_type = other RNA
cgaccttgcccaagccttggcagcgccagtagaggcaggg

SEQ ID NO: 5786 - RNA, 41 nt, synthetic construct
  source 1..41: mol_type = other RNA
tgtttgcgccctccgccttggcagcgccagtagaggcaggg

SEQ ID NO: 5787 - RNA, 41 nt, synthetic construct
  source 1..41: mol_type = other RNA
gttcagctcagggatatgtatatacacagccttggcagcgc

SEQ ID NO: 5788 - RNA, 41 nt, synthetic construct
  source 1..41: mol_type = other RNA
tgaaatcactcacagccttcgcagcgccagtagaggcaggg

SEQ ID NO: 5789 - RNA, 41 nt, synthetic construct
  source 1..41: mol_type = other RNA
caacctcatccaccgccttggcagcgccagtagaggcaggg

SEQ ID NO: 5790 - RNA, 41 nt, synthetic construct
  source 1..41: mol_type = other RNA
gttcagctcaggggaaaccgcacccacagccttggcagcgc

SEQ ID NO: 5791 - RNA, 41 nt, synthetic construct
  source 1..41: mol_type = other RNA
tgaccttgcccacagtcttagcagcgccagtagaggcaggg

SEQ ID NO: 5792 - RNA, 43 nt, synthetic construct
  source 1..43: mol_type = other RNA
tggcgccccacgtctaccttcggcagcgccagtagaggcaggg

SEQ ID NO: 5793 - RNA, 41 nt, synthetic construct
  source 1..41: mol_type = other RNA
tgacctctcccaccgccttggcagcgccagtagaggcaggg

SEQ ID NO: 5794 - RNA, 41 nt, synthetic construct
  source 1..41: mol_type = other RNA
tggtatcgcccaaggcccatccagcgccagtagaggcaggg

SEQ ID NO: 5795 - RNA, 41 nt, synthetic construct
  source 1..41: mol_type = other RNA
taacctcgcctacagctatggcagcgccagtagaggcaggg

SEQ ID NO: 5796 - RNA, 45 nt, synthetic construct
  source 1..45: mol_type = other RNA
ccagtgagcttcccgttcagccaacggatgacattgagtgcccac

SEQ ID NO: 5797 - RNA, 41 nt, synthetic construct
  source 1..41: mol_type = other RNA
tgacctcgcccaaagccttgccagcgccagtagaggcaggg

SEQ ID NO: 5798 - RNA, 41 nt, synthetic construct
  source 1..41: mol_type = other RNA
gttcagctcagggctgaccacgaccacagccttggcagcgc

SEQ ID NO: 5799 - RNA, 41 nt, synthetic construct
  source 1..41: mol_type = other RNA
tgacctcaaacacagtcttggcagcgccagtagaggcaggg

SEQ ID NO: 5800 - RNA, 41 nt, synthetic construct
  source 1..41: mol_type = other RNA
tgaccttgccgaccgcgttaacagcgccagtagaggcaggg

SEQ ID NO: 5801 - RNA, 48 nt, synthetic construct
  source 1..48: mol_type = other RNA
tgacctgacagtcaccccgccctcatgccagcgccagtagaggcaggg

SEQ ID NO: 5802 - RNA, 41 nt, synthetic construct
  source 1..41: mol_type = other RNA
ggaccttgcccagcgccttgacagcgccagtagaggcaggg

SEQ ID NO: 5803 - RNA, 42 nt, synthetic construct
  source 1..42: mol_type = other RNA
tgaacttcacaacaagcgttggcagcgccagtagaggcaggg

SEQ ID NO: 5804 - RNA, 41 nt, synthetic construct
  source 1..41: mol_type = other RNA
tggccccgcccgtagcgttggcagcgccagtagaggcaggg

SEQ ID NO: 5805 - RNA, 41 nt, synthetic construct
  source 1..41: mol_type = other RNA
cgacctcgcccatcaccttggcagcgccagtagaggcaggg

SEQ ID NO: 5806 - RNA, 41 nt, synthetic construct
  source 1..41: mol_type = other RNA
tgacctcgcgtacagccttttcagcgccagtagaggcaggg

SEQ ID NO: 5807 - RNA, 43 nt, synthetic construct
  source 1..43: mol_type = other RNA
gttcagctcagggctgtggcgcccacgtctaccttggcagcgc

SEQ ID NO: 5808 - RNA, 44 nt, synthetic construct
  source 1..44: mol_type = other RNA
gttcagctcagggctgtggcgccccacgtctaccttggcagcgc

SEQ ID NO: 5809 - RNA, 41 nt, synthetic construct
  source 1..41: mol_type = other RNA
tcaccttgcacacagcctttgcagcgccagtagaggcaggg

SEQ ID NO: 5810 - RNA, 41 nt, synthetic construct
  source 1..41: mol_type = other RNA
tgacatcgcccatggccttaacagcgccagtagaggcaggg

SEQ ID NO: 5811 - RNA, 41 nt, synthetic construct
  source 1..41: mol_type = other RNA
gttcagctcagacgagaccctgccctcagctttggcagcgc

SEQ ID NO: 5812 - RNA, 38 nt, synthetic construct
  source 1..38: mol_type = other RNA
ctttgccaaaatgcttggcagcgccagtagaggcaggg

SEQ ID NO: 5813 - RNA, 37 nt, synthetic construct
  source 1..37: mol_type = other RNA
gttcagctcagggcttcgccaaaatgcttggcagcgc

SEQ ID NO: 5814 - RNA, 41 nt, synthetic construct
  source 1..41: mol_type = other RNA
gttcagctcatatctgaccccagccacagccttggcagcgc

SEQ ID NO: 5815 - RNA, 45 nt, synthetic construct
  source 1..45: mol_type = other RNA
tgatattgagtgcccacagccttgccagcgccagtagaggcaggg

SEQ ID NO: 5816 - RNA, 39 nt, synthetic construct
  source 1..39: mol_type = other RNA
tgccctcgctcagctttttcagcgccagtagaggcaggg

SEQ ID NO: 5817 - RNA, 41 nt, synthetic construct
  source 1..41: mol_type = other RNA
tggtctcgcccaaagccttgccagcgccagtagaggcaggg

SEQ ID NO: 5818 - RNA, 49 nt, synthetic construct
  source 1..49: mol_type = other RNA
gttcagctcagggatgacctgacagtcaccccgccctcattggcagcgc

SEQ ID NO: 5819 - RNA, 48 nt, synthetic construct
  source 1..48: mol_type = other RNA
gttcagctcagggcaatggtgccgcctcgcccacggccttggcagcgc

SEQ ID NO: 5820 - RNA, 41 nt, synthetic construct
  source 1..41: mol_type = other RNA
tgaacacacccacagcctaggcagcgccagtagaggcaggg

SEQ ID NO: 5821 - RNA, 41 nt, synthetic construct
  source 1..41: mol_type = other RNA
tgtcctttcccacagcactggcagcgccagtagaggcaggg

SEQ ID NO: 5822 - RNA, 41 nt, synthetic construct
  source 1..41: mol_type = other RNA
ccagtgagcttcccgttcagctcagggatggcgtcacccag

SEQ ID NO: 5823 - RNA, 41 nt, synthetic construct
  source 1..41: mol_type = other RNA
tgcccttgcttacagcagtggcagcgccagtagaggcaggg

SEQ ID NO: 5824 - RNA, 41 nt, synthetic construct
  source 1..41: mol_type = other RNA
tgccctcgcttacagcagtggcagcgccagtagaggcaggg

SEQ ID NO: 5825 - RNA, 40 nt, synthetic construct
  source 1..40: mol_type = other RNA
cgacctcgcccaagccttagcagcgccagtagaggcaggg

SEQ ID NO: 5826 - RNA, 49 nt, synthetic construct
  source 1..49: mol_type = other RNA
gttcagctcaaaggatgaccttgcccccagccgtgaggcttggcagcgc

SEQ ID NO: 5827 - RNA, 41 nt, synthetic construct
  source 1..41: mol_type = other RNA
tgtattcgcccacagccttggcagcgccagtagaggcaggg

SEQ ID NO: 5828 - RNA, 41 nt, synthetic construct
  source 1..41: mol_type = other RNA
tgatcttactcagagccttcgcagcgccagtagaggcaggg

SEQ ID NO: 5829 - RNA, 41 nt, synthetic construct
  source 1..41: mol_type = other RNA
tgaacttgctcacagactttgcagcgccagtagaggcaggg

SEQ ID NO: 5830 - RNA, 41 nt, synthetic construct
  source 1..41: mol_type = other RNA
ccagtgagcttcccgttcagctcagggatgacctccccgaa

SEQ ID NO: 5831 - RNA, 41 nt, synthetic construct
  source 1..41: mol_type = other RNA
tgaactcgcccccagcgttggcagcgccagtagaggcaggg

SEQ ID NO: 5832 - RNA, 41 nt, synthetic construct
  source 1..41: mol_type = other RNA
ccagtgagcttcccgttcagctcagggatttgtatatacac

SEQ ID NO: 5833 - RNA, 41 nt, synthetic construct
  source 1..41: mol_type = other RNA
ccagtgagcttcccgttcagctcagggatacgtatatacac

SEQ ID NO: 5834 - RNA, 41 nt, synthetic construct
  source 1..41: mol_type = other RNA
ccagtgagcttcccgttcagctcagggatgacctagcctac

SEQ ID NO: 5835 - RNA, 41 nt, synthetic construct
  source 1..41: mol_type = other RNA
tgacctcgcacacggtcttcgcagcgccagtagaggcaggg

SEQ ID NO: 5836 - RNA, 41 nt, synthetic construct
  source 1..41: mol_type = other RNA
tgacattgcccatggccttaacagcgccagtagaggcaggg

SEQ ID NO: 5837 - RNA, 41 nt, synthetic construct
  source 1..41: mol_type = other RNA
ccagtgagcttcccgttcagctcagggatgaccttgtccac

SEQ ID NO: 5838 - RNA, 41 nt, synthetic construct
  source 1..41: mol_type = other RNA
tgacctcgcccacagtcttaacagcgccagtagaggcaggg

SEQ ID NO: 5839 - RNA, 44 nt, synthetic construct
  source 1..44: mol_type = other RNA
tgaccccacccacgcagttcttggcagcgccagtagaggcaggg

SEQ ID NO: 5840 - RNA, 41 nt, synthetic construct
  source 1..41: mol_type = other RNA
aaaccgcacccacagcctcggcagcgccagtagaggcaggg

SEQ ID NO: 5841 - RNA, 41 nt, synthetic construct
  source 1..41: mol_type = other RNA
tgacctcaaccccagccttggcagcgccagtagaggcaggg

SEQ ID NO: 5842 - RNA, 40 nt, synthetic construct
  source 1..40: mol_type = other RNA
cgaccttgcccaagccttagcagcgccagtagaggcaggg

SEQ ID NO: 5843 - RNA, 41 nt, synthetic construct
  source 1..41: mol_type = other RNA
tgacttcgcccacaacctaggcagcgccagtagaggcaggg

SEQ ID NO: 5844 - RNA, 45 nt, synthetic construct
  source 1..45: mol_type = other RNA
gttcagctcacggatgatattgagcgcccacagccttggcagcgc

SEQ ID NO: 5845 - RNA, 41 nt, synthetic construct
  source 1..41: mol_type = other RNA
tgacattgcccacggtcttggcagcgccagtagaggcaggg

SEQ ID NO: 5846 - RNA, 41 nt, synthetic construct
  source 1..41: mol_type = other RNA
taacctcgcccacagctttggcagcgccagtagaggcaggg

SEQ ID NO: 5847 - RNA, 41 nt, synthetic construct
  source 1..41: mol_type = other RNA
ccagtgagcttcccgttcagctcagggatgtattggcccac

SEQ ID NO: 5848 - RNA, 41 nt, synthetic construct
  source 1..41: mol_type = other RNA
tttgtatatacacagccttggcagcgccagtagaggcaggg

SEQ ID NO: 5849 - RNA, 41 nt, synthetic construct
  source 1..41: mol_type = other RNA
ccagtgagcttcccgttcagctcacggatgaccttgcagaa

SEQ ID NO: 5850 - RNA, 41 nt, synthetic construct
  source 1..41: mol_type = other RNA
tgcccttagccacagccttggcagcgccagtagaggcaggg

SEQ ID NO: 5851 - RNA, 41 nt, synthetic construct
  source 1..41: mol_type = other RNA
tgaaatcacccaccggcttggcagcgccagtagaggcaggg

SEQ ID NO: 5852 - RNA, 41 nt, synthetic construct
  source 1..41: mol_type = other RNA
ccagtgagcttcccgttcagctaagggctaacctcacacac

SEQ ID NO: 5853 - RNA, 41 nt, synthetic construct
  source 1..41: mol_type = other RNA
tgaccgtgcccacggccttggcagcgccagtagaggcaggg

SEQ ID NO: 5854 - RNA, 41 nt, synthetic construct
  source 1..41: mol_type = other RNA
tggtctcgcccagaagcttggcagcgccagtagaggcaggg

SEQ ID NO: 5855 - RNA, 41 nt, synthetic construct
  source 1..41: mol_type = other RNA
tgacctcgcgcacggccttggcagcgccagtagaggcaggg

SEQ ID NO: 5856 - RNA, 42 nt, synthetic construct
  source 1..42: mol_type = other RNA
tgacttcgctctacagccttggcagcgccagtagaggcaggg

SEQ ID NO: 5857 - RNA, 41 nt, synthetic construct
  source 1..41: mol_type = other RNA
ccagtgagcttcccgttcagctcagagatgaccttaaacac

SEQ ID NO: 5858 - RNA, 41 nt, synthetic construct
  source 1..41: mol_type = other RNA
tgaccttgcagacagccttggcagcgccagtagaggcaggg

SEQ ID NO: 5859 - RNA, 41 nt, synthetic construct
  source 1..41: mol_type = other RNA
tgacgtcgccgaaagccttggcagcgccagtagaggcaggg

SEQ ID NO: 5860 - RNA, 41 nt, synthetic construct
  source 1..41: mol_type = other RNA
tgtattggcccacagccttggcagcgccagtagaggcaggg

SEQ ID NO: 5861 - RNA, 41 nt, synthetic construct
  source 1..41: mol_type = other RNA
tggtagtgatggcatggactgtggtcatgagtccttccacg

SEQ ID NO: 5862 - RNA, 42 nt, synthetic construct
  source 1..42: mol_type = other RNA
cacagtcttctgggcgagcagcgacggacatgactgtggtca

SEQ ID NO: 5863 - RNA, 41 nt, synthetic construct
  source 1..41: mol_type = other RNA
cacagtcttctaggcggccgcgatggcttggactgtggtca

SEQ ID NO: 5864 - RNA, 41 nt, synthetic construct
  source 1..41: mol_type = other RNA
ccggaggggccatccacagtcttctgggtggcagcgatgga

SEQ ID NO: 5865 - RNA, 41 nt, synthetic construct
  source 1..41: mol_type = other RNA
cacagtcttctgggtggccgcgatggcatgaactgtggtca

SEQ ID NO: 5866 - RNA, 41 nt, synthetic construct
  source 1..41: mol_type = other RNA
cacagtcttctgggttggcagcgatgcgcggactgtggtca

SEQ ID NO: 5867 - RNA, 41 nt, synthetic construct
  source 1..41: mol_type = other RNA
cacagtcttctaggaggctgcgatgggatggactgtggtca

SEQ ID NO: 5868 - RNA, 41 nt, synthetic construct
  source 1..41: mol_type = other RNA
cacagtcttctggatggcagcgatgaaatggactgtggtca

SEQ ID NO: 5869 - RNA, 41 nt, synthetic construct
  source 1..41: mol_type = other RNA
ccggaggggccatccacagtcttctggtaggcagcgatggc

SEQ ID NO: 5870 - RNA, 42 nt, synthetic construct
  source 1..42: mol_type = other RNA
cacagtcttctgagttggcagcgatggcatgaactgtggtca

SEQ ID NO: 5871 - RNA, 41 nt, synthetic construct
  source 1..41: mol_type = other RNA
cacagtcttctgagtggcagcgatgctatggactgtggtca

SEQ ID NO: 5872 - RNA, 41 nt, synthetic construct
  source 1..41: mol_type = other RNA
cacagtcttctgggttggcagcgatggacggactgtggtca

SEQ ID NO: 5873 - RNA, 41 nt, synthetic construct
  source 1..41: mol_type = other RNA
cacagtcttctgggtgacagcgacagcatggactgtggtca

SEQ ID NO: 5874 - RNA, 43 nt, synthetic construct
  source 1..43: mol_type = other RNA
cacagtcttctgggtggcggcgatggcacatggactgtggtca

SEQ ID NO: 5875 - RNA, 41 nt, synthetic construct
  source 1..41: mol_type = other RNA
cacagtcttctgggtggtagtgatggcatggactgtggtca

SEQ ID NO: 5876 - RNA, 41 nt, synthetic construct
  source 1..41: mol_type = other RNA
cacagtcttccgggttggcagcgatgcacggactgtggtca

SEQ ID NO: 5877 - RNA, 41 nt, synthetic construct
  source 1..41: mol_type = other RNA
cacagtcttctgggtggcggcgatgaaatggactgtggtca

SEQ ID NO: 5878 - RNA, 41 nt, synthetic construct
  source 1..41: mol_type = other RNA
cacagtcttctggggggcagcgatggcatagactgtggtca

SEQ ID NO: 5879 - RNA, 41 nt, synthetic construct
  source 1..41: mol_type = other RNA
cacagtcttccgggtggccgcgatggcacggactgtggtca

SEQ ID NO: 5880 - RNA, 41 nt, synthetic construct
  source 1..41: mol_type = other RNA
ccggaggggccatccacagtcttctgagtgggagcgatggc

SEQ ID NO: 5881 - RNA, 41 nt, synthetic construct
  source 1..41: mol_type = other RNA
tggcggcaatggcatggactgtggtcatgagtccttccacg

SEQ ID NO: 5882 - RNA, 41 nt, synthetic construct
  source 1..41: mol_type = other RNA
cacagtcttcagggaggcagcgatgggatggactgtggtca

SEQ ID NO: 5883 - RNA, 41 nt, synthetic construct
  source 1..41: mol_type = other RNA
cacagtcttctgggaggccgcgagggcatggactgtggtca

SEQ ID NO: 5884 - RNA, 41 nt, synthetic construct
  source 1..41: mol_type = other RNA
cacagtcttctgggtggcagcgatggtatggactgtggtca

SEQ ID NO: 5885 - RNA, 41 nt, synthetic construct
  source 1..41: mol_type = other RNA
cacagtcttctgggtgacagcgatggcatgtactgtggtca

SEQ ID NO: 5886 - RNA, 41 nt, synthetic construct
  source 1..41: mol_type = other RNA
cacagtcttctggatggtagcgatgggatggactgtggtca

SEQ ID NO: 5887 - RNA, 42 nt, synthetic construct
  source 1..42: mol_type = other RNA
ccggaggggccatccacagtcttctggtggtgcagcgatggc

SEQ ID NO: 5888 - RNA, 41 nt, synthetic construct
  source 1..41: mol_type = other RNA
ccggaggggccatccacagtcttctgggtggcagcaatggc

SEQ ID NO: 5889 - RNA, 39 nt, synthetic construct
  source 1..39: mol_type = other RNA
cacagtcttctgggtggcggcgatggcggactgtggtca

SEQ ID NO: 5890 - RNA, 41 nt, synthetic construct
  source 1..41: mol_type = other RNA
ccggaggggccatccacagtcttctgagtggcagcgatggt

SEQ ID NO: 5891 - RNA, 41 nt, synthetic construct
  source 1..41: mol_type = other RNA
ccggaggggccatccacagtcttctttgtggcagcgagggc

SEQ ID NO: 5892 - RNA, 41 nt, synthetic construct
  source 1..41: mol_type = other RNA
ccggaggggccatccacagtcttcggggtggccgcgatggc

SEQ ID NO: 5893 - RNA, 41 nt, synthetic construct
  source 1..41: mol_type = other RNA
cacagtcttctgggtggcagtgatggcacggactgtggtca

SEQ ID NO: 5894 - RNA, 41 nt, synthetic construct
  source 1..41: mol_type = other RNA
tggcagtgatggctttgattgtggtcatgagtccttccacg

SEQ ID NO: 5895 - RNA, 41 nt, synthetic construct
  source 1..41: mol_type = other RNA
cacagtcttctgggtggcagtgatggtacggactgtggtca

SEQ ID NO: 5896 - RNA, 41 nt, synthetic construct
  source 1..41: mol_type = other RNA
cacagtcttctggatggcagcgatcgcatggactgtggtca

SEQ ID NO: 5897 - RNA, 42 nt, synthetic construct
  source 1..42: mol_type = other RNA
cacagtcttctcggtggcagcgatggacctggactgtggtca

SEQ ID NO: 5898 - RNA, 41 nt, synthetic construct
  source 1..41: mol_type = other RNA
cacagtcttctgggtggcagcgatggaccaaactgtggtca

SEQ ID NO: 5899 - RNA, 41 nt, synthetic construct
  source 1..41: mol_type = other RNA
ccggaggggccatccacagtcttccgggttggcagtgatgc

SEQ ID NO: 5900 - RNA, 44 nt, synthetic construct
  source 1..44: mol_type = other RNA
cacagtcttcttggtggcagcgatggcaacctggactgtggtca

SEQ ID NO: 5901 - RNA, 41 nt, synthetic construct
  source 1..41: mol_type = other RNA
cacagtcttctgggtggccgcgatggcacggactgtggtca

SEQ ID NO: 5902 - RNA, 42 nt, synthetic construct
  source 1..42: mol_type = other RNA
cacagtcttctgagtgggagcgatggcattggactgtggtca

SEQ ID NO: 5903 - RNA, 41 nt, synthetic construct
  source 1..41: mol_type = other RNA
cacagtcttccgggtggcagcgacggcatggactgtggtca

SEQ ID NO: 5904 - RNA, 41 nt, synthetic construct
  source 1..41: mol_type = other RNA
cacagtcttctgggtggcagcgatggtcatgactgtggtca

SEQ ID NO: 5905 - RNA, 41 nt, synthetic construct
  source 1..41: mol_type = other RNA
cacagtcttctgtgtggcagtaatggcatggactgtggtca

SEQ ID NO: 5906 - RNA, 41 nt, synthetic construct
  source 1..41: mol_type = other RNA
ccggaggggccatccacagtcttctgggtcgcagcgatggc

SEQ ID NO: 5907 - RNA, 41 nt, synthetic construct
  source 1..41: mol_type = other RNA
ccggaggggccatccacagtcctctgggtggcagcaatggc

SEQ ID NO: 5908 - RNA, 42 nt, synthetic construct
  source 1..42: mol_type = other RNA
ccggaggggccatccacagtcgttctaggaggctgcgatggg

SEQ ID NO: 5909 - RNA, 41 nt, synthetic construct
  source 1..41: mol_type = other RNA
ccggaggggccatccacagtcttccgggttggcagcgatgc

SEQ ID NO: 5910 - RNA, 41 nt, synthetic construct
  source 1..41: mol_type = other RNA
ccggaggggccatccacagtcttctgggtggcatcgatggc

SEQ ID NO: 5911 - RNA, 41 nt, synthetic construct
  source 1..41: mol_type = other RNA
ccggaggggccatccacagtcttctcggtggcagcgatggc

SEQ ID NO: 5912 - RNA, 41 nt, synthetic construct
  source 1..41: mol_type = other RNA
cacagtcttctgggtggcagcgatcgtatggactgtggtca

SEQ ID NO: 5913 - RNA, 41 nt, synthetic construct
  source 1..41: mol_type = other RNA
cacagtcttctgagtggcagcgatggtacagactgtggtca

SEQ ID NO: 5914 - RNA, 41 nt, synthetic construct
  source 1..41: mol_type = other RNA
tgacagcgatggcatgtattgtggtcatgagtccttccacg

SEQ ID NO: 5915 - RNA, 41 nt, synthetic construct
  source 1..41: mol_type = other RNA
cacagtcttctgggttggcagtgatggacggactgtggtca

SEQ ID NO: 5916 - RNA, 41 nt, synthetic construct
  source 1..41: mol_type = other RNA
cacagtcttctgggtggcggtgatagcatggactgtggtca

SEQ ID NO: 5917 - RNA, 41 nt, synthetic construct
  source 1..41: mol_type = other RNA
cacagtcttctgggtggcagcgatgaaataaactgtggtca

SEQ ID NO: 5918 - RNA, 41 nt, synthetic construct
  source 1..41: mol_type = other RNA
ccggaggggccatccacagtcttctgggtggcagcgatgac

SEQ ID NO: 5919 - RNA, 41 nt, synthetic construct
  source 1..41: mol_type = other RNA
cacagtcttctgggtgggagcgatggcgcatactgtggtca

SEQ ID NO: 5920 - RNA, 41 nt, synthetic construct
  source 1..41: mol_type = other RNA
ccggaggggccatccacagtcttctggatggcagcgacggc

SEQ ID NO: 5921 - RNA, 42 nt, synthetic construct
  source 1..42: mol_type = other RNA
ccggaggggccatccacagtcttcgtgggtggcagcgatgga

SEQ ID NO: 5922 - RNA, 41 nt, synthetic construct
  source 1..41: mol_type = other RNA
ccggaggggccatccacagtcttatgggtggcagcgatagc

SEQ ID NO: 5923 - RNA, 41 nt, synthetic construct
  source 1..41: mol_type = other RNA
ccggaggggccatccacagtcttctgggtggcagcgatggg

SEQ ID NO: 5924 - RNA, 43 nt, synthetic construct
  source 1..43: mol_type = other RNA
cacagtcttctgggtggcagcgatggccgatggactgtggtca

SEQ ID NO: 5925 - RNA, 41 nt, synthetic construct
  source 1..41: mol_type = other RNA
ccggaggggccatccacagtcctctgggtgggagcgatggc

SEQ ID NO: 5926 - RNA, 41 nt, synthetic construct
  source 1..41: mol_type = other RNA
gggcagcgatggcatggactgtggtcatgagtccttccacg

SEQ ID NO: 5927 - RNA, 41 nt, synthetic construct
  source 1..41: mol_type = other RNA
ccggaggggccatccacagtcttctgggtgggcacaatggc

SEQ ID NO: 5928 - RNA, 41 nt, synthetic construct
  source 1..41: mol_type = other RNA
ccggaggggccatccacagtattctgggtggccgcgatggc

SEQ ID NO: 5929 - RNA, 40 nt, synthetic construct
  source 1..40: mol_type = other RNA
ccggaggggccatccacagtctctgggtggcagcgatggc

SEQ ID NO: 5930 - RNA, 41 nt, synthetic construct
  source 1..41: mol_type = other RNA
cacagtcttctgggtggcggcgatagcatggactgtggtca

SEQ ID NO: 5931 - RNA, 41 nt, synthetic construct
  source 1..41: mol_type = other RNA
cacagtcttctgggtggcagcgatggacaggactgtggtca

SEQ ID NO: 5932 - RNA, 41 nt, synthetic construct
  source 1..41: mol_type = other RNA
cacagtcttctgggtggcggtgatggcatagactgtggtca

SEQ ID NO: 5933 - RNA, 41 nt, synthetic construct
  source 1..41: mol_type = other RNA
cacagtcttctgggtgggagcgatggcatggactgtggtca

SEQ ID NO: 5934 - RNA, 41 nt, synthetic construct
  source 1..41: mol_type = other RNA
ccggaggggccatccacagtcttctggggggcagcgatggc

SEQ ID NO: 5935 - RNA, 41 nt, synthetic construct
  source 1..41: mol_type = other RNA
ccggaggggccatccacagtcttctgggtggcagcgatggt

SEQ ID NO: 5936 - RNA, 42 nt, synthetic construct
  source 1..42: mol_type = other RNA
ccggaggggccatccacagtcttctgaattggcagtgatgga

SEQ ID NO: 5937 - RNA, 41 nt, synthetic construct
  source 1..41: mol_type = other RNA
cacagtcttctgggtggcagcgacggcgtggactgtggtca

SEQ ID NO: 5938 - RNA, 41 nt, synthetic construct
  source 1..41: mol_type = other RNA
ccggaggggccatccacagtcttctgggtggcagagttggc

SEQ ID NO: 5939 - RNA, 41 nt, synthetic construct
  source 1..41: mol_type = other RNA
cacagtcttctgggtggcagcgacggcattgactgtggtca

SEQ ID NO: 5940 - RNA, 43 nt, synthetic construct
  source 1..43: mol_type = other RNA
cacagtcttctgggtggcagtgatggccgatggactgtggtca

SEQ ID NO: 5941 - RNA, 41 nt, synthetic construct
  source 1..41: mol_type = other RNA
cacagtcttctgggtggcaatgatggcatggactgtggtca

SEQ ID NO: 5942 - RNA, 41 nt, synthetic construct
  source 1..41: mol_type = other RNA
cacagtcttctgggtggcggcgatgcatgcaactgtggtca

SEQ ID NO: 5943 - RNA, 41 nt, synthetic construct
  source 1..41: mol_type = other RNA
cacagtcttctggatggcagcgacggcatggactgtggtca

SEQ ID NO: 5944 - RNA, 41 nt, synthetic construct
  source 1..41: mol_type = other RNA
ccggaggggccatccacagtcttctgagtggcagcaatggc

SEQ ID NO: 5945 - RNA, 41 nt, synthetic construct
  source 1..41: mol_type = other RNA
cacagtcttctggggggcagtaatggcatagactgtggtca

SEQ ID NO: 5946 - RNA, 41 nt, synthetic construct
  source 1..41: mol_type = other RNA
cacagtcttctggtaggcagcgatggcatggactgtggtca

SEQ ID NO: 5947 - RNA, 41 nt, synthetic construct
  source 1..41: mol_type = other RNA
cacagtcttccgggtggcagcgatgacatggactgtggtca

SEQ ID NO: 5948 - RNA, 41 nt, synthetic construct
  source 1..41: mol_type = other RNA
cacagtcttctgggtggccgtgatggcatggactgtggtca

SEQ ID NO: 5949 - RNA, 43 nt, synthetic construct
  source 1..43: mol_type = other RNA
ccggaggggccatccacagtcttcgtggatcagcagcgacggc

SEQ ID NO: 5950 - RNA, 41 nt, synthetic construct
  source 1..41: mol_type = other RNA
cacagtcttctgggtggcagcgacggcttggactgtggtca

SEQ ID NO: 5951 - RNA, 42 nt, synthetic construct
  source 1..42: mol_type = other RNA
cacagtcttctggaggtgcagcgatggcatgaactgtggtca

SEQ ID NO: 5952 - RNA, 41 nt, synthetic construct
  source 1..41: mol_type = other RNA
tggctgcaatggcatgggatgtggtcatgagtccttccacg

SEQ ID NO: 5953 - RNA, 41 nt, synthetic construct
  source 1..41: mol_type = other RNA
ccggaggggccatccacagtcttccgggtggcagcgatggc

SEQ ID NO: 5954 - RNA, 41 nt, synthetic construct
  source 1..41: mol_type = other RNA
tggaagcaatagcgtggactgtggtcatgagtccttccacg

SEQ ID NO: 5955 - RNA, 41 nt, synthetic construct
  source 1..41: mol_type = other RNA
ccggaggggccatccacagtcttctgggttggcagcgatgg

SEQ ID NO: 5956 - RNA, 41 nt, synthetic construct
  source 1..41: mol_type = other RNA
cacagtcttctttgtggcagcgagggcatggactgtggtca

SEQ ID NO: 5957 - RNA, 40 nt, synthetic construct
  source 1..40: mol_type = other RNA
ccggaggggccatccacagtcttctggatgcagcgatggc

SEQ ID NO: 5958 - RNA, 41 nt, synthetic construct
  source 1..41: mol_type = other RNA
tggcagcgatggtcatgactgtggtcatgagtccttccacg

SEQ ID NO: 5959 - RNA, 41 nt, synthetic construct
  source 1..41: mol_type = other RNA
cacagtcttctgggtggcagtgatgacatggactgtggtca

SEQ ID NO: 5960 - RNA, 41 nt, synthetic construct
  source 1..41: mol_type = other RNA
cacagtcttctgggtggaagcaatagcgtggactgtggtca

SEQ ID NO: 5961 - RNA, 41 nt, synthetic construct
  source 1..41: mol_type = other RNA
cacagtcttctgggtggaagcaatggaatggactgtggtca

SEQ ID NO: 5962 - RNA, 41 nt, synthetic construct
  source 1..41: mol_type = other RNA
cacagtcttctgagtggcagcgatggcaacgactgtggtca

SEQ ID NO: 5963 - RNA, 41 nt, synthetic construct
  source 1..41: mol_type = other RNA
cacagtcttctgggtggcagcgatgacatggactgtggtca

SEQ ID NO: 5964 - RNA, 41 nt, synthetic construct
  source 1..41: mol_type = other RNA
ccggaggggccatccacagtcttctaggcggccgcgatggc

SEQ ID NO: 5965 - RNA, 41 nt, synthetic construct
  source 1..41: mol_type = other RNA
tggcagcaatggcgtgggctgtggtcatgagtccttccacg

SEQ ID NO: 5966 - RNA, 42 nt, synthetic construct
  source 1..42: mol_type = other RNA
ccggaggggccatccacagtcttggggaacggcagcgacggc

SEQ ID NO: 5967 - RNA, 41 nt, synthetic construct
  source 1..41: mol_type = other RNA
cacagtcttccgggtggcagcgatggtatggactgtggtca

SEQ ID NO: 5968 - RNA, 41 nt, synthetic construct
  source 1..41: mol_type = other RNA
cacagtcttctgggtggccgcgatggcatggactgtggtca

SEQ ID NO: 5969 - RNA, 38 nt, synthetic construct
  source 1..38: mol_type = other RNA
ccggaggggccatccacagtctcgggggcagcgatggc

SEQ ID NO: 5970 - RNA, 41 nt, synthetic construct
  source 1..41: mol_type = other RNA
cacagtcttctgggtggcagcgatggcgactactgtggtca

SEQ ID NO: 5971 - RNA, 43 nt, synthetic construct
  source 1..43: mol_type = other RNA
cacagtcttctgggtggcagcaatggcagaacgactgtggtca

SEQ ID NO: 5972 - RNA, 41 nt, synthetic construct
  source 1..41: mol_type = other RNA
cacagtcttctgggttgcagcaatggataggactgtggtca

SEQ ID NO: 5973 - RNA, 42 nt, synthetic construct
  source 1..42: mol_type = other RNA
ttggcagtgatggcatgaactgtggtcatgagtccttccacg

SEQ ID NO: 5974 - RNA, 41 nt, synthetic construct
  source 1..41: mol_type = other RNA
ccggaggggccatccacagtcttctgggtggcagtgatggg

SEQ ID NO: 5975 - RNA, 41 nt, synthetic construct
  source 1..41: mol_type = other RNA
cacagtcttctgggttagagcgatagtatgaactgtggtca

SEQ ID NO: 5976 - RNA, 41 nt, synthetic construct
  source 1..41: mol_type = other RNA
cacagtcttctgggtagcagcaatggaatgcactgtggtca

SEQ ID NO: 5977 - RNA, 41 nt, synthetic construct
  source 1..41: mol_type = other RNA
ccggaggggccatccacagtctcatgggtggcagcgatggc

SEQ ID NO: 5978 - RNA, 41 nt, synthetic construct
  source 1..41: mol_type = other RNA
tggcagcaatggtacagactgtggtcatgagtccttccacg

SEQ ID NO: 5979 - RNA, 41 nt, synthetic construct
  source 1..41: mol_type = other RNA
ccggaggggccatccacagtcttctggatggcagcaatggc

SEQ ID NO: 5980 - RNA, 41 nt, synthetic construct
  source 1..41: mol_type = other RNA
ccggaggggccatccacagtcttctgtgtggcagcaatggc

SEQ ID NO: 5981 - RNA, 41 nt, synthetic construct
  source 1..41: mol_type = other RNA
cacagtcttctgggtggcggcgatggcgtggactgtggtca

SEQ ID NO: 5982 - RNA, 41 nt, synthetic construct
  source 1..41: mol_type = other RNA
cacagtcttctgggtggcagtgatgaaatgcactgtggtca

SEQ ID NO: 5983 - RNA, 41 nt, synthetic construct
  source 1..41: mol_type = other RNA
cacagtcttctgagtggcagtgatgctatggactgtggtca

SEQ ID NO: 5984 - RNA, 41 nt, synthetic construct
  source 1..41: mol_type = other RNA
ccggaggggccatccacagtcttctgggtggcagcgctggc

SEQ ID NO: 5985 - RNA, 41 nt, synthetic construct
  source 1..41: mol_type = other RNA
cacagtcttctggggggcagcaatggcatagactgtggtca

SEQ ID NO: 5986 - RNA, 41 nt, synthetic construct
  source 1..41: mol_type = other RNA
cacagtcttctgggtggcagtgatggcataaactgtggtca

SEQ ID NO: 5987 - RNA, 41 nt, synthetic construct
  source 1..41: mol_type = other RNA
ccggaggggccatccacagtcttctgggtggcagcgatgaa

SEQ ID NO: 5988 - RNA, 41 nt, synthetic construct
  source 1..41: mol_type = other RNA
tggcagcgacggcatgggctgtggtcatgagtccttccacg

SEQ ID NO: 5989 - RNA, 43 nt, synthetic construct
  source 1..43: mol_type = other RNA
ccggaggggccatccacagtcttctgggcgagcagcgacggac

SEQ ID NO: 5990 - RNA, 41 nt, synthetic construct
  source 1..41: mol_type = other RNA
cacagtcttctgggtcgcagcgatggcctggactgtggtca

SEQ ID NO: 5991 - RNA, 41 nt, synthetic construct
  source 1..41: mol_type = other RNA
tggcagcgatggcatggacagtggtcatgagtccttccacg

SEQ ID NO: 5992 - RNA, 41 nt, synthetic construct
  source 1..41: mol_type = other RNA
cacagtcttctgggtggcagtgatgaaataaactgtggtca

SEQ ID NO: 5993 - RNA, 44 nt, synthetic construct
  source 1..44: mol_type = other RNA
cacagtcttctgggtggcagcgatggcagaatgcactgtggtca

SEQ ID NO: 5994 - RNA, 41 nt, synthetic construct
  source 1..41: mol_type = other RNA
tggcagcgacggcattgactgtggtcatgagtccttccacg

SEQ ID NO: 5995 - RNA, 42 nt, synthetic construct
  source 1..42: mol_type = other RNA
taggcagcgatggcatggactgtggtcatgagtccttccacg

SEQ ID NO: 5996 - RNA, 41 nt, synthetic construct
  source 1..41: mol_type = other RNA
cacagtcttctgggtggcatcgatggcatggactgtggtca

SEQ ID NO: 5997 - RNA, 41 nt, synthetic construct
  source 1..41: mol_type = other RNA
cacagtcttctgggtggcagcgatgggctggactgtggtca

SEQ ID NO: 5998 - RNA, 41 nt, synthetic construct
  source 1..41: mol_type = other RNA
ccggaggggccatccacagtcttctgggtggcagcgattac

SEQ ID NO: 5999 - RNA, 41 nt, synthetic construct
  source 1..41: mol_type = other RNA
cacagtcttctgggtggcggcgatggcatggactgtggtca

SEQ ID NO: 6000 - RNA, 41 nt, synthetic construct
  source 1..41: mol_type = other RNA
ccggaggggccatccacagtactcagggtggccgcgatggc

SEQ ID NO: 6001 - RNA, 42 nt, synthetic construct
  source 1..42: mol_type = other RNA
cacagtcttctgggtggcagcgatggtcatggactgtggtca

SEQ ID NO: 6002 - RNA, 41 nt, synthetic construct
  source 1..41: mol_type = other RNA
ccggaggggccatccacagtctcatgggtggcagtgatggc

SEQ ID NO: 6003 - RNA, 41 nt, synthetic construct
  source 1..41: mol_type = other RNA
cacagtcttctgggtggcagcgatggcatagactgtggtca

SEQ ID NO: 6004 - RNA, 41 nt, synthetic construct
  source 1..41: mol_type = other RNA
tggcagcaatggaatggactgtggtcatgagtccttccacg

SEQ ID NO: 6005 - RNA, 41 nt, synthetic construct
  source 1..41: mol_type = other RNA
ccggaggggccatccacagtcttctgagtgggagtgatggc

SEQ ID NO: 6006 - RNA, 41 nt, synthetic construct
  source 1..41: mol_type = other RNA
tggcagcgatggcacggactgtggtcatgagtccttccacg

SEQ ID NO: 6007 - RNA, 42 nt, synthetic construct
  source 1..42: mol_type = other RNA
cacagtcttctgagtgcccagcgatggtatggactgtggtca

SEQ ID NO: 6008 - RNA, 41 nt, synthetic construct
  source 1..41: mol_type = other RNA
cacagtcttctgggtggaagcaatagcatgaactgtggtca

SEQ ID NO: 6009 - RNA, 41 nt, synthetic construct
  source 1..41: mol_type = other RNA
ccggaggggccatccacagtcttctggatggcagcagtggc

SEQ ID NO: 6010 - RNA, 41 nt, synthetic construct
  source 1..41: mol_type = other RNA
cacagtcttctggttggcagcaatggaatggactgtggtca

SEQ ID NO: 6011 - RNA, 41 nt, synthetic construct
  source 1..41: mol_type = other RNA
ccggaggggccatccacagtcttccgggtggcagcgatggt

SEQ ID NO: 6012 - RNA, 41 nt, synthetic construct
  source 1..41: mol_type = other RNA
ccggaggggccatccacagtcttctgtgtggcagtaatggc

SEQ ID NO: 6013 - RNA, 41 nt, synthetic construct
  source 1..41: mol_type = other RNA
ccggaggggccatccacagtcttctgggtgacagcgacagc

SEQ ID NO: 6014 - RNA, 41 nt, synthetic construct
  source 1..41: mol_type = other RNA
cacagtcttctcgggggcagcgatggcatggactgtggtca

SEQ ID NO: 6015 - RNA, 41 nt, synthetic construct
  source 1..41: mol_type = other RNA
tggcagcgatggctttgattgtggtcatgagtccttccacg

SEQ ID NO: 6016 - RNA, 41 nt, synthetic construct
  source 1..41: mol_type = other RNA
cacagtcttccgggtggcagcgatggcacggactgtggtca

SEQ ID NO: 6017 - RNA, 43 nt, synthetic construct
  source 1..43: mol_type = other RNA
ccggaggggccatccacagtcttctggaggtggcagcaatgta

SEQ ID NO: 6018 - RNA, 41 nt, synthetic construct
  source 1..41: mol_type = other RNA
cacagtcttcttagtggcagcgagggcatggactgtggtca

SEQ ID NO: 6019 - RNA, 41 nt, synthetic construct
  source 1..41: mol_type = other RNA
cacagtcttctgggtgggagcaatggcatggactgtggtca

SEQ ID NO: 6020 - RNA, 41 nt, synthetic construct
  source 1..41: mol_type = other RNA
tggcagtactggcacggactgtggtcatgagtccttccacg

SEQ ID NO: 6021 - RNA, 47 nt, synthetic construct
  source 1..47: mol_type = other RNA
cacagtcttctgtatggcagcgatggcttgtccatggactgtggtca

SEQ ID NO: 6022 - RNA, 42 nt, synthetic construct
  source 1..42: mol_type = other RNA
ccggaggggccatccacagtcttcatgggtgacagcgatggc

SEQ ID NO: 6023 - RNA, 41 nt, synthetic construct
  source 1..41: mol_type = other RNA
cacagtcttctgggtggcagcgacagaatggactgtggtca

SEQ ID NO: 6024 - RNA, 41 nt, synthetic construct
  source 1..41: mol_type = other RNA
ccggaggggccatccacagtcctctgggtgacagcgatggc

SEQ ID NO: 6025 - RNA, 41 nt, synthetic construct
  source 1..41: mol_type = other RNA
ccggaggggccatccacagtagtctaggtggcagcgatagc

SEQ ID NO: 6026 - RNA, 39 nt, synthetic construct
  source 1..39: mol_type = other RNA
tggcagcaatggtatgctgtggtcatgagtccttccacg

SEQ ID NO: 6027 - RNA, 41 nt, synthetic construct
  source 1..41: mol_type = other RNA
cacagtcttctgggtggcagcgaaggcatggactgtggtca

SEQ ID NO: 6028 - RNA, 41 nt, synthetic construct
  source 1..41: mol_type = other RNA
tggcagcgatggtacggactgtggtcatgagtccttccacg

SEQ ID NO: 6029 - RNA, 41 nt, synthetic construct
  source 1..41: mol_type = other RNA
ccggaggggccatccacagtcttccgggtggcagtgatgac

SEQ ID NO: 6030 - RNA, 41 nt, synthetic construct
  source 1..41: mol_type = other RNA
aggcagccatggcatggactgtggtcatgagtccttccacg

SEQ ID NO: 6031 - RNA, 41 nt, synthetic construct
  source 1..41: mol_type = other RNA
tggcggcaatggcatggacagtggtcatgagtccttccacg

SEQ ID NO: 6032 - RNA, 46 nt, synthetic construct
  source 1..46: mol_type = other RNA
cacagtcttctgggtcgcagcgatgtccacgcatggactgtggtca

SEQ ID NO: 6033 - RNA, 41 nt, synthetic construct
  source 1..41: mol_type = other RNA
cacagtcttctgggtcgcagtaatggaatcgactgtggtca

SEQ ID NO: 6034 - RNA, 41 nt, synthetic construct
  source 1..41: mol_type = other RNA
ccggaggggccatccacagtcttctggatggcagcgatgaa

SEQ ID NO: 6035 - RNA, 41 nt, synthetic construct
  source 1..41: mol_type = other RNA
cacagtcttctgggtggcagcgatgaaatgcactgtggtca

SEQ ID NO: 6036 - RNA, 41 nt, synthetic construct
  source 1..41: mol_type = other RNA
ccggaggggccatccacagtcttctgggttagagtgatagt

SEQ ID NO: 6037 - RNA, 41 nt, synthetic construct
  source 1..41: mol_type = other RNA
tggcagcaatggcatggactgtggtcatgagtccttccacg

SEQ ID NO: 6038 - RNA, 41 nt, synthetic construct
  source 1..41: mol_type = other RNA
ccggaggggccatccacagtcttctggatggcagtgacggc

SEQ ID NO: 6039 - RNA, 41 nt, synthetic construct
  source 1..41: mol_type = other RNA
ccggaggggccatccacagtcttctgggtgggcaccatggc

SEQ ID NO: 6040 - RNA, 43 nt, synthetic construct
  source 1..43: mol_type = other RNA
cacagtcttctggaggtggcagcaatggaatggactgtggtca

SEQ ID NO: 6041 - RNA, 42 nt, synthetic construct
  source 1..42: mol_type = other RNA
tggcagcgatggcatgtccctgtggtcatgagtccttccacg

SEQ ID NO: 6042 - RNA, 40 nt, synthetic construct
  source 1..40: mol_type = other RNA
ccggaggggccatccacagtcattgggtgcagcacccggc

SEQ ID NO: 6043 - RNA, 43 nt, synthetic construct
  source 1..43: mol_type = other RNA
cacagtcttctgggtggcggtgatggcacatggactgtggtca

SEQ ID NO: 6044 - RNA, 41 nt, synthetic construct
  source 1..41: mol_type = other RNA
ccggaggggccatccacagtcttctgggtggcagtgatgaa

SEQ ID NO: 6045 - RNA, 43 nt, synthetic construct
  source 1..43: mol_type = other RNA
cacagtcttctcggtggccgcaatggctcatggactgtggtca

SEQ ID NO: 6046 - RNA, 41 nt, synthetic construct
  source 1..41: mol_type = other RNA
ccggaggggccatccacagtcttctggatggcagcgatggc

SEQ ID NO: 6047 - RNA, 41 nt, synthetic construct
  source 1..41: mol_type = other RNA
cacagtcttccgggttggcagtgatgcacggactgtggtca

SEQ ID NO: 6048 - RNA, 41 nt, synthetic construct
  source 1..41: mol_type = other RNA
cacagtcttctgggtggctgcaatggcatggactgtggtca

SEQ ID NO: 6049 - RNA, 39 nt, synthetic construct
  source 1..39: mol_type = other RNA
cacagtcttctgggtggcggtgatggcggactgtggtca

SEQ ID NO: 6050 - RNA, 41 nt, synthetic construct
  source 1..41: mol_type = other RNA
ccggaggggccatccacagtcttatgagtggcagcgatgcc

SEQ ID NO: 6051 - RNA, 41 nt, synthetic construct
  source 1..41: mol_type = other RNA
cacagtcttctgggtggcagcgatggtatgcactgtggtca

SEQ ID NO: 6052 - RNA, 41 nt, synthetic construct
  source 1..41: mol_type = other RNA
ccggaggggccatccacagtcttctgggtggcagcgttggc

SEQ ID NO: 6053 - RNA, 41 nt, synthetic construct
  source 1..41: mol_type = other RNA
cacagtcttctgggccgcagcaatggaatagactgtggtca

SEQ ID NO: 6054 - RNA, 41 nt, synthetic construct
  source 1..41: mol_type = other RNA
ccggaggggccatccacagtcttcagggaggcagcgatggg

SEQ ID NO: 6055 - RNA, 41 nt, synthetic construct
  source 1..41: mol_type = other RNA
ccggaggggccatccacagtgttctgggttggcagcgatgc

SEQ ID NO: 6056 - RNA, 41 nt, synthetic construct
  source 1..41: mol_type = other RNA
ccggaggggccatccacagtcttctgggtggcaatgatggc

SEQ ID NO: 6057 - RNA, 41 nt, synthetic construct
  source 1..41: mol_type = other RNA
tagcagcaatggaatgcactgtggtcatgagtccttccacg

SEQ ID NO: 6058 - RNA, 41 nt, synthetic construct
  source 1..41: mol_type = other RNA
cacagtcttctgggtggcagtgatggaccaaactgtggtca

SEQ ID NO: 6059 - RNA, 41 nt, synthetic construct
  source 1..41: mol_type = other RNA
ccggaggggccatccacagtagtctgggtggcagcgatagc

SEQ ID NO: 6060 - RNA, 42 nt, synthetic construct
  source 1..42: mol_type = other RNA
cacagtcttctgggcgagcagtgacggacatgactgtggtca

SEQ ID NO: 6061 - RNA, 43 nt, synthetic construct
  source 1..43: mol_type = other RNA
cacagtcttctggaggtggcagcaatgtaatggactgtggtca

SEQ ID NO: 6062 - RNA, 38 nt, synthetic construct
  source 1..38: mol_type = other RNA
ccggaggggccatccacagttttccaagtggcagcaac

SEQ ID NO: 6063 - RNA, 41 nt, synthetic construct
  source 1..41: mol_type = other RNA
ccggaggggccatccacagtattcggggtggcagtgatggc

SEQ ID NO: 6064 - RNA, 41 nt, synthetic construct
  source 1..41: mol_type = other RNA
tggcagcgatggcatgaattgtggtcatgagtccttccacg

SEQ ID NO: 6065 - RNA, 42 nt, synthetic construct
  source 1..42: mol_type = other RNA
ccggaggggccatccacagtcttcgtgggtggcagcgatggc

SEQ ID NO: 6066 - RNA, 41 nt, synthetic construct
  source 1..41: mol_type = other RNA
cacagtcttctgggtggcggcgatggcatagactgtggtca

SEQ ID NO: 6067 - RNA, 42 nt, synthetic construct
  source 1..42: mol_type = other RNA
ccggaggggccatccacagtcctctgagttggcagcgatggc

SEQ ID NO: 6068 - RNA, 41 nt, synthetic construct
  source 1..41: mol_type = other RNA
ccggaggggccatccacagtctcgtgggtggctgcaatggc

SEQ ID NO: 6069 - RNA, 42 nt, synthetic construct
  source 1..42: mol_type = other RNA
tggcagcaatggcatgtgactgtggtcatgagtccttccacg

SEQ ID NO: 6070 - RNA, 41 nt, synthetic construct
  source 1..41: mol_type = other RNA
ccggaggggccatccacagtcttgtgggtggcagcgacggc

SEQ ID NO: 6071 - RNA, 41 nt, synthetic construct
  source 1..41: mol_type = other RNA
ccggaggggccatccacagtcttctgggtggcagcgatcgt

SEQ ID NO: 6072 - RNA, 41 nt, synthetic construct
  source 1..41: mol_type = other RNA
cacagtcttctggatggcagtgatgaaatggactgtggtca

SEQ ID NO: 6073 - RNA, 41 nt, synthetic construct
  source 1..41: mol_type = other RNA
tggcagcgaaggcatgggctgtggtcatgagtccttccacg

SEQ ID NO: 6074 - RNA, 41 nt, synthetic construct
  source 1..41: mol_type = other RNA
cacagtcttctgggtggcagtgatagcatggactgtggtca

SEQ ID NO: 6075 - RNA, 41 nt, synthetic construct
  source 1..41: mol_type = other RNA
cacagtcttccgggtggcagtgatgacatggactgtggtca

SEQ ID NO: 6076 - RNA, 41 nt, synthetic construct
  source 1..41: mol_type = other RNA
ccggaggggccatccacagtctcgtgggtggcagcgatggc

SEQ ID NO: 6077 - RNA, 41 nt, synthetic construct
  source 1..41: mol_type = other RNA
tggcagcgatcgtatgggctgtggtcatgagtccttccacg

SEQ ID NO: 6078 - RNA, 41 nt, synthetic construct
  source 1..41: mol_type = other RNA
ccggaggggccatccacagtctgctgggtggcagcgatgga

SEQ ID NO: 6079 - RNA, 45 nt, synthetic construct
  source 1..45: mol_type = other RNA
cacagtcttctgtgtggcagcaatggtctacatggactgtggtca

SEQ ID NO: 6080 - RNA, 41 nt, synthetic construct
  source 1..41: mol_type = other RNA
ccggaggggccatccacagtattccgggtggccgcgatggc

SEQ ID NO: 6081 - RNA, 41 nt, synthetic construct
  source 1..41: mol_type = other RNA
cacagtcttctgggtggcagcgctggcatggactgtggtca

SEQ ID NO: 6082 - RNA, 42 nt, synthetic construct
  source 1..42: mol_type = other RNA
ggtgcagcgatggcatgaactgtggtcatgagtccttccacg

SEQ ID NO: 6083 - RNA, 41 nt, synthetic construct
  source 1..41: mol_type = other RNA
ccggaggggccatccacagtcttcttggtggcagcgatggc

SEQ ID NO: 6084 - RNA, 41 nt, synthetic construct
  source 1..41: mol_type = other RNA
ccggaggggccatccacagtctcctgggtggcagcgatggc

SEQ ID NO: 6085 - RNA, 41 nt, synthetic construct
  source 1..41: mol_type = other RNA
ccggaggggccatccacagtcctctgggtgggagtgatggc

SEQ ID NO: 6086 - RNA, 41 nt, synthetic construct
  source 1..41: mol_type = other RNA
cacagtcttctgggtggcagtgatggaatggactgtggtca

SEQ ID NO: 6087 - RNA, 41 nt, synthetic construct
  source 1..41: mol_type = other RNA
cacagtcttctgggtggcagcaatggaatcgactgtggtca

SEQ ID NO: 6088 - RNA, 41 nt, synthetic construct
  source 1..41: mol_type = other RNA
ccggaggggccatccacagtcttctggatggcagtgatggc

SEQ ID NO: 6089 - RNA, 39 nt, synthetic construct
  source 1..39: mol_type = other RNA
ccggaggggccatccacagttctgggtggcagtgacggc

SEQ ID NO: 6090 - RNA, 41 nt, synthetic construct
  source 1..41: mol_type = other RNA
cacagtcttctgggtcgaagcgatagcatggactgtggtca

SEQ ID NO: 6091 - RNA, 42 nt, synthetic construct
  source 1..42: mol_type = other RNA
cacagtcttctggatcagcagcgacggcacagactgtggtca

SEQ ID NO: 6092 - RNA, 41 nt, synthetic construct
  source 1..41: mol_type = other RNA
ccggaggggccatccacagtcttcaaggtggcagcaatggc

SEQ ID NO: 6093 - RNA, 45 nt, synthetic construct
  source 1..45: mol_type = other RNA
ccggaggggccatccacagtcttctgtgtggcagcaatggtctac

SEQ ID NO: 6094 - RNA, 41 nt, synthetic construct
  source 1..41: mol_type = other RNA
ccggaggggccatccacagtcaccctggtggcagcgatgaa

SEQ ID NO: 6095 - RNA, 41 nt, synthetic construct
  source 1..41: mol_type = other RNA
cacagtcttccgggtggcagcaatggcgtggactgtggtca

SEQ ID NO: 6096 - RNA, 41 nt, synthetic construct
  source 1..41: mol_type = other RNA
cacagtcttccgggtggcagcaatggccgagactgtggtca

SEQ ID NO: 6097 - RNA, 41 nt, synthetic construct
  source 1..41: mol_type = other RNA
tggcagcgatggaatggactgtggtcatgagtccttccacg

SEQ ID NO: 6098 - RNA, 41 nt, synthetic construct
  source 1..41: mol_type = other RNA
tggcagcaatggcatggattgtggtcatgagtccttccacg

SEQ ID NO: 6099 - RNA, 41 nt, synthetic construct
  source 1..41: mol_type = other RNA
ccggaggggccatccacagtcgcctcggtggcagcgatggc

SEQ ID NO: 6100 - RNA, 42 nt, synthetic construct
  source 1..42: mol_type = other RNA
ccggaggggccatccacagtcttctgagtgcccagcgatggc

SEQ ID NO: 6101 - RNA, 41 nt, synthetic construct
  source 1..41: mol_type = other RNA
ccggaggggccatccacagtcttctaaatggcagtactggc

SEQ ID NO: 6102 - RNA, 39 nt, synthetic construct
  source 1..39: mol_type = other RNA
ccggaggggccatccacagtcttcaggtgcagcaatggc

SEQ ID NO: 6103 - RNA, 41 nt, synthetic construct
  source 1..41: mol_type = other RNA
tggccgcgatggcacggactgtggtcatgagtccttccacg

SEQ ID NO: 6104 - RNA, 43 nt, synthetic construct
  source 1..43: mol_type = other RNA
cacagtcttcggggaacggcagcgacggcccagactgtggtca

SEQ ID NO: 6105 - RNA, 41 nt, synthetic construct
  source 1..41: mol_type = other RNA
cacagtcttctgggtggcagcgatggcatcgactgtggtca

SEQ ID NO: 6106 - RNA, 42 nt, synthetic construct
  source 1..42: mol_type = other RNA
cacagtcttctgggtggcagcaatggcatgtgactgtggtca

SEQ ID NO: 6107 - RNA, 41 nt, synthetic construct
  source 1..41: mol_type = other RNA
cacagtcttctgggtggcagcaatggcatgaactgtggtca

SEQ ID NO: 6108 - RNA, 41 nt, synthetic construct
  source 1..41: mol_type = other RNA
cacagtcttctgtgtggcagcaatggcatggactgtggtca

SEQ ID NO: 6109 - RNA, 41 nt, synthetic construct
  source 1..41: mol_type = other RNA
cacagtcttctgggtgacagtgacagcatggactgtggtca

SEQ ID NO: 6110 - RNA, 41 nt, synthetic construct
  source 1..41: mol_type = other RNA
cacagtcttctcggtggcagcgatggcatggactgtggtca

SEQ ID NO: 6111 - RNA, 41 nt, synthetic construct
  source 1..41: mol_type = other RNA
ccggaggggccatccacagtcttcggggtgggagcgagggc

SEQ ID NO: 6112 - RNA, 41 nt, synthetic construct
  source 1..41: mol_type = other RNA
ccggaggggccatccacagtcttccgggtggcagcgatgac

SEQ ID NO: 6113 - RNA, 41 nt, synthetic construct
  source 1..41: mol_type = other RNA
tggcggcgatggcgtggactgtggtcatgagtccttccacg

SEQ ID NO: 6114 - RNA, 41 nt, synthetic construct
  source 1..41: mol_type = other RNA
ccggaggggccatccacagtcttctgtgtggcagcgatggc

SEQ ID NO: 6115 - RNA, 42 nt, synthetic construct
  source 1..42: mol_type = other RNA
ccggaggggccatccacagtcttctgaattggcagcgatgga

SEQ ID NO: 6116 - RNA, 41 nt, synthetic construct
  source 1..41: mol_type = other RNA
tggcagcgatggaatggaatgtggtcatgagtccttccacg

SEQ ID NO: 6117 - RNA, 41 nt, synthetic construct
  source 1..41: mol_type = other RNA
ccggaggggccatccacagtccgctgggtggcagtgatggc

SEQ ID NO: 6118 - RNA, 41 nt, synthetic construct
  source 1..41: mol_type = other RNA
ccggaggggccatccacagtcttctaaacggctgtgatggc

SEQ ID NO: 6119 - RNA, 41 nt, synthetic construct
  source 1..41: mol_type = other RNA
cacagtcttctgggtggcagcgctggcatagactgtggtca

SEQ ID NO: 6120 - RNA, 41 nt, synthetic construct
  source 1..41: mol_type = other RNA
ccggaggggccatccacagtcttctgggtggcggcgatggc

SEQ ID NO: 6121 - RNA, 42 nt, synthetic construct
  source 1..42: mol_type = other RNA
tggcagcaatggcatgttcctgtggtcatgagtccttccacg

SEQ ID NO: 6122 - RNA, 41 nt, synthetic construct
  source 1..41: mol_type = other RNA
tcgcagtaatggaatcgactgtggtcatgagtccttccacg

SEQ ID NO: 6123 - RNA, 44 nt, synthetic construct
  source 1..44: mol_type = other RNA
ccggaggggccatccacagtcttctgggtggcagcgatgcatgc

SEQ ID NO: 6124 - RNA, 41 nt, synthetic construct
  source 1..41: mol_type = other RNA
ccggaggggccatccacagtcttctgggtgggagtgatggc

SEQ ID NO: 6125 - RNA, 43 nt, synthetic construct
  source 1..43: mol_type = other RNA
tggccgcaatggctcatggactgtggtcatgagtccttccacg

SEQ ID NO: 6126 - RNA, 41 nt, synthetic construct
  source 1..41: mol_type = other RNA
tggtagcgatgggatggactgtggtcatgagtccttccacg

SEQ ID NO: 6127 - RNA, 41 nt, synthetic construct
  source 1..41: mol_type = other RNA
cacagtcttctgggtggcagtgacggcgtggactgtggtca

SEQ ID NO: 6128 - RNA, 44 nt, synthetic construct
  source 1..44: mol_type = other RNA
tgacaacaatgatggcatgggctgtggtcatgagtccttccacg

SEQ ID NO: 6129 - RNA, 41 nt, synthetic construct
  source 1..41: mol_type = other RNA
ccggaggggccatccacagtcttctgggttggcagtgatgg

SEQ ID NO: 6130 - RNA, 41 nt, synthetic construct
  source 1..41: mol_type = other RNA
cacagtcttcggggtggcagcgatggcatggactgtggtca

SEQ ID NO: 6131 - RNA, 41 nt, synthetic construct
  source 1..41: mol_type = other RNA
cacagtcttctgggtgggagtgatggcatggactgtggtca

SEQ ID NO: 6132 - RNA, 41 nt, synthetic construct
  source 1..41: mol_type = other RNA
ccggaggggccatccacagtcttctcggtggccgcaatggc

SEQ ID NO: 6133 - RNA, 40 nt, synthetic construct
  source 1..40: mol_type = other RNA
tgcagcaatggcatggactgtggtcatgagtccttccacg

SEQ ID NO: 6134 - RNA, 41 nt, synthetic construct
  source 1..41: mol_type = other RNA
ccggaggggccatccacagtcttctgggtggccgcgatggc

SEQ ID NO: 6135 - RNA, 41 nt, synthetic construct
  source 1..41: mol_type = other RNA
tcgcagcgatggcctggaatgtggtcatgagtccttccacg

SEQ ID NO: 6136 - RNA, 41 nt, synthetic construct
  source 1..41: mol_type = other RNA
cacagtcttctgggtggcagcaatggcatgtactgtggtca

SEQ ID NO: 6137 - RNA, 41 nt, synthetic construct
  source 1..41: mol_type = other RNA
cacagtcttctgggtggcagtgatggcgactactgtggtca

SEQ ID NO: 6138 - RNA, 41 nt, synthetic construct
  source 1..41: mol_type = other RNA
tggcagcgatgacatggattgtggtcatgagtccttccacg

SEQ ID NO: 6139 - RNA, 41 nt, synthetic construct
  source 1..41: mol_type = other RNA
tggcagcgatggtacagactgtggtcatgagtccttccacg

SEQ ID NO: 6140 - RNA, 41 nt, synthetic construct
  source 1..41: mol_type = other RNA
ccggaggggccatccacagtcttctggatggcagtgatgaa

SEQ ID NO: 6141 - RNA, 41 nt, synthetic construct
  source 1..41: mol_type = other RNA
ccggaggggccatccacagttttccgggtggcagcgatggc

SEQ ID NO: 6142 - RNA, 41 nt, synthetic construct
  source 1..41: mol_type = other RNA
cacagtcttctgggtggtagcgatggcatggactgtggtca

SEQ ID NO: 6143 - RNA, 41 nt, synthetic construct
  source 1..41: mol_type = other RNA
ccggaggggccatccacagtcttctgggtggcagtgatgga

SEQ ID NO: 6144 - RNA, 41 nt, synthetic construct
  source 1..41: mol_type = other RNA
ccggaggggccatccacagtcttctgggtgggagcgatggc

SEQ ID NO: 6145 - RNA, 44 nt, synthetic construct
  source 1..44: mol_type = other RNA
cacagtcttctgtggtggcagcgctggcatctggactgtggtca

SEQ ID NO: 6146 - RNA, 47 nt, synthetic construct
  source 1..47: mol_type = other RNA
ccggaggggccatccacagtcttctgtatggcagcgatggcttgtcc

SEQ ID NO: 6147 - RNA, 40 nt, synthetic construct
  source 1..40: mol_type = other RNA
ccggaggggccatccacagtcttctgagtgtagcaatggc

SEQ ID NO: 6148 - RNA, 41 nt, synthetic construct
  source 1..41: mol_type = other RNA
cacagtcttctgggtggcagtgatggcatgtactgtggtca

SEQ ID NO: 6149 - RNA, 39 nt, synthetic construct
  source 1..39: mol_type = other RNA
ccggaggggccatccacagtctttgggttgcagcaatgg

SEQ ID NO: 6150 - RNA, 41 nt, synthetic construct
  source 1..41: mol_type = other RNA
tggcagcaatggcatggattatggtcatgagtccttccacg

SEQ ID NO: 6151 - RNA, 41 nt, synthetic construct
  source 1..41: mol_type = other RNA
cacagtcttctgggtggcagcgatggcataaactgtggtca

SEQ ID NO: 6152 - RNA, 41 nt, synthetic construct
  source 1..41: mol_type = other RNA
cacagtcttctgggtggcagcaatggtacagactgtggtca

SEQ ID NO: 6153 - RNA, 41 nt, synthetic construct
  source 1..41: mol_type = other RNA
cacagtcttctgggtggcggtgatgaaatggactgtggtca

SEQ ID NO: 6154 - RNA, 42 nt, synthetic construct
  source 1..42: mol_type = other RNA
cacagtcttctgggtgagcagcaacggtatgcactgtggtca

SEQ ID NO: 6155 - RNA, 41 nt, synthetic construct
  source 1..41: mol_type = other RNA
ccggaggggccatccacagtgttctgggtgggagcgatggc

SEQ ID NO: 6156 - RNA, 41 nt, synthetic construct
  source 1..41: mol_type = other RNA
cacagtcttctgggtcgcagcaatggaatcgactgtggtca

SEQ ID NO: 6157 - RNA, 41 nt, synthetic construct
  source 1..41: mol_type = other RNA
tggcagcgatggtatgcactatggtcatgagtccttccacg

SEQ ID NO: 6158 - RNA, 39 nt, synthetic construct
  source 1..39: mol_type = other RNA
ccggaggggccatccacagtcttctgggtacggccgatg

SEQ ID NO: 6159 - RNA, 43 nt, synthetic construct
  source 1..43: mol_type = other RNA
tggcagcgatggtcatggaactttggtcatgagtccttccacg

SEQ ID NO: 6160 - RNA, 41 nt, synthetic construct
  source 1..41: mol_type = other RNA
tggcagtgatggcacggactgtggtcatgagtccttccacg

SEQ ID NO: 6161 - RNA, 41 nt, synthetic construct
  source 1..41: mol_type = other RNA
tggcagcgatggcatggcctatggtcatgagtccttccacg

SEQ ID NO: 6162 - RNA, 41 nt, synthetic construct
  source 1..41: mol_type = other RNA
cacagtcttctaggtggcagcgatagcatggactgtggtca

SEQ ID NO: 6163 - RNA, 41 nt, synthetic construct
  source 1..41: mol_type = other RNA
cacagtcttctgggtgggcgcaatggcatggactgtggtca

SEQ ID NO: 6164 - RNA, 46 nt, synthetic construct
  source 1..46: mol_type = other RNA
ccggaggggccatccacagtcttctgggtcgcagcgatgtccacgc

SEQ ID NO: 6165 - RNA, 41 nt, synthetic construct
  source 1..41: mol_type = other RNA
tggcagcgatggcatcggccgtggtcatgagtccttccacg

SEQ ID NO: 6166 - RNA, 41 nt, synthetic construct
  source 1..41: mol_type = other RNA
cacagtcttctgggtggcagtgatgggctggactgtggtca

SEQ ID NO: 6167 - RNA, 41 nt, synthetic construct
  source 1..41: mol_type = other RNA
tggcagagttggcaggtgctgtggtcatgagtccttccacg

SEQ ID NO: 6168 - RNA, 41 nt, synthetic construct
  source 1..41: mol_type = other RNA
cacagtcttctgggtggcagcgatagcatggactgtggtca

SEQ ID NO: 6169 - RNA, 41 nt, synthetic construct
  source 1..41: mol_type = other RNA
cacagtcttctgggtggcagcgatggcatggactgtggtca

SEQ ID NO: 6170 - RNA, 43 nt, synthetic construct
  source 1..43: mol_type = other RNA
ccggaggggccatccacagtctgttggaggtggcagcaatgga

SEQ ID NO: 6171 - RNA, 41 nt, synthetic construct
  source 1..41: mol_type = other RNA
cacagtcttctgggtggcggcaatggcatggactgtggtca

SEQ ID NO: 6172 - RNA, 42 nt, synthetic construct
  source 1..42: mol_type = other RNA
ttggcagcgatggcatgaactgtggtcatgagtccttccacg

SEQ ID NO: 6173 - RNA, 41 nt, synthetic construct
  source 1..41: mol_type = other RNA
ccggaggggccatccacagtcttccgggtggcagcaatggc

SEQ ID NO: 6174 - RNA, 42 nt, synthetic construct
  source 1..42: mol_type = other RNA
cacagtcttctagggtggcagcaatggcatggactgtggtca

SEQ ID NO: 6175 - RNA, 41 nt, synthetic construct
  source 1..41: mol_type = other RNA
tggcagcgatggcacggaatgtggtcatgagtccttccacg

SEQ ID NO: 6176 - RNA, 41 nt, synthetic construct
  source 1..41: mol_type = other RNA
cacagtcttctgggtggcagcaatggcctggactgtggtca

SEQ ID NO: 6177 - RNA, 40 nt, synthetic construct
  source 1..40: mol_type = other RNA
ccggaggggccatccacagtctttgggtggcagcaatggt

SEQ ID NO: 6178 - RNA, 41 nt, synthetic construct
  source 1..41: mol_type = other RNA
tggcagtgatggtacagactgtggtcatgagtccttccacg

SEQ ID NO: 6179 - RNA, 41 nt, synthetic construct
  source 1..41: mol_type = other RNA
cacagtcttctgggtggcagcgatggaatggactgtggtca

SEQ ID NO: 6180 - RNA, 41 nt, synthetic construct
  source 1..41: mol_type = other RNA
cacagtcttctggatggcagcaatggcatggactgtggtca

SEQ ID NO: 6181 - RNA, 41 nt, synthetic construct
  source 1..41: mol_type = other RNA
cacagtcttctgcgtggcagcagtggcacagactgtggtca

SEQ ID NO: 6182 - RNA, 41 nt, synthetic construct
  source 1..41: mol_type = other RNA
ccggaggggccatccacagtcttccgggtggcaatgatggc

SEQ ID NO: 6183 - RNA, 39 nt, synthetic construct
  source 1..39: mol_type = other RNA
ccggaggggccatccacagtcttctgacgcagcactggc

SEQ ID NO: 6184 - RNA, 41 nt, synthetic construct
  source 1..41: mol_type = other RNA
tggcagcgatggcatgggctgtggtcatgagtccttccacg

SEQ ID NO: 6185 - RNA, 42 nt, synthetic construct
  source 1..42: mol_type = other RNA
cgagcagcgacggacatgactgtggtcatgagtccttccacg

SEQ ID NO: 6186 - RNA, 41 nt, synthetic construct
  source 1..41: mol_type = other RNA
ccggaggggccatccacagtattctgggtcgcagcgatggc

SEQ ID NO: 6187 - RNA, 41 nt, synthetic construct
  source 1..41: mol_type = other RNA
cacagtcttctgggtggcagtgatggctttgactgtggtca

SEQ ID NO: 6188 - RNA, 44 nt, synthetic construct
  source 1..44: mol_type = other RNA
ccggaggggccatccacagtcttctgggtgacaacaatgatggc

SEQ ID NO: 6189 - RNA, 41 nt, synthetic construct
  source 1..41: mol_type = other RNA
ccggaggggccatccacagtcttctgggtagcagcaatgga

SEQ ID NO: 6190 - RNA, 41 nt, synthetic construct
  source 1..41: mol_type = other RNA
cacagtcttctggatggcagtgacggcatggactgtggtca

SEQ ID NO: 6191 - RNA, 41 nt, synthetic construct
  source 1..41: mol_type = other RNA
tggtagcgatggcatggactgtggtcatgagtccttccacg

SEQ ID NO: 6192 - RNA, 41 nt, synthetic construct
  source 1..41: mol_type = other RNA
ccggaggggccatccacagtcttctgggtggaagcaatgga

SEQ ID NO: 6193 - RNA, 41 nt, synthetic construct
  source 1..41: mol_type = other RNA
tggcagcgatggaatggagtgtggtcatgagtccttccacg

SEQ ID NO: 6194 - RNA, 41 nt, synthetic construct
  source 1..41: mol_type = other RNA
cacagtcttcggggtgggagcgagggcacaaactgtggtca

SEQ ID NO: 6195 - RNA, 41 nt, synthetic construct
  source 1..41: mol_type = other RNA
ccggaggggccatccacagtcttctgggtgggagcaatggc

SEQ ID NO: 6196 - RNA, 41 nt, synthetic construct
  source 1..41: mol_type = other RNA
ccggaggggccatccacagtcttctgggtggccgcaatgac

SEQ ID NO: 6197 - RNA, 41 nt, synthetic construct
  source 1..41: mol_type = other RNA
tggcagcgatggacagggatgtggtcatgagtccttccacg

SEQ ID NO: 6198 - RNA, 41 nt, synthetic construct
  source 1..41: mol_type = other RNA
ccggaggggccatccacagtcttctgagtggcagcgatggc

SEQ ID NO: 6199 - RNA, 39 nt, synthetic construct
  source 1..39: mol_type = other RNA
tggcagcgatggcaacgagtggtcatgagtccttccacg

SEQ ID NO: 6200 - RNA, 40 nt, synthetic construct
  source 1..40: mol_type = other RNA
tggcagcgatgcacggcctgtggtcatgagtccttccacg

SEQ ID NO: 6201 - RNA, 41 nt, synthetic construct
  source 1..41: mol_type = other RNA
ccggaggggccatccacagtcttctgggaggccgtgagggc

SEQ ID NO: 6202 - RNA, 41 nt, synthetic construct
  source 1..41: mol_type = other RNA
ccggaggggccatccacagtcttctgggaggccgcgagggc

SEQ ID NO: 6203 - RNA, 41 nt, synthetic construct
  source 1..41: mol_type = other RNA
gggcagcaatggcatagaacgtggtcatgagtccttccacg

SEQ ID NO: 6204 - RNA, 41 nt, synthetic construct
  source 1..41: mol_type = other RNA
tcgcagcaatggaatcgactgtggtcatgagtccttccacg

SEQ ID NO: 6205 - RNA, 44 nt, synthetic construct
  source 1..44: mol_type = other RNA
ccggaggggccatccacagtcttctgggtggcagtgatgcatgc

SEQ ID NO: 6206 - RNA, 41 nt, synthetic construct
  source 1..41: mol_type = other RNA
cacagtcttctgggtggcagtgatggcatggactgtggtca

SEQ ID NO: 6207 - RNA, 41 nt, synthetic construct
  source 1..41: mol_type = other RNA
ccggaggggccatccacagtcttctggatggcagcgatcgc

SEQ ID NO: 6208 - RNA, 41 nt, synthetic construct
  source 1..41: mol_type = other RNA
ccggaggggccatccacagtcgcctcggtggcagtgatggc

SEQ ID NO: 6209 - RNA, 41 nt, synthetic construct
  source 1..41: mol_type = other RNA
tggcagcaatggaatcgaatgtggtcatgagtccttccacg

SEQ ID NO: 6210 - RNA, 41 nt, synthetic construct
  source 1..41: mol_type = other RNA
cacagtcttctgggtggcagtgacggcattgactgtggtca

SEQ ID NO: 6211 - RNA, 41 nt, synthetic construct
  source 1..41: mol_type = other RNA
ccggaggggccatccacagtcttatgggtcgaagcgatagc

SEQ ID NO: 6212 - RNA, 41 nt, synthetic construct
  source 1..41: mol_type = other RNA
ccggaggggccatccacagtcgtctggatggtagcgatggg

SEQ ID NO: 6213 - RNA, 41 nt, synthetic construct
  source 1..41: mol_type = other RNA
ccggaggggccatccacagtggtctcagtggcagcactggt

SEQ ID NO: 6214 - RNA, 41 nt, synthetic construct
  source 1..41: mol_type = other RNA
cacagtcttcagggaggcagtgatgggatggactgtggtca

SEQ ID NO: 6215 - RNA, 40 nt, synthetic construct
  source 1..40: mol_type = other RNA
tggcagtgatgcacggcctgtggtcatgagtccttccacg

SEQ ID NO: 6216 - RNA, 41 nt, synthetic construct
  source 1..41: mol_type = other RNA
tggcagcgatagcatgggctgtggtcatgagtccttccacg

SEQ ID NO: 6217 - RNA, 41 nt, synthetic construct
  source 1..41: mol_type = other RNA
ccggaggggccatccacagtcctatgggtgacaatgatggc

SEQ ID NO: 6218 - RNA, 41 nt, synthetic construct
  source 1..41: mol_type = other RNA
ccggaggggccatccacagtcttctcggtggcagcgatgga

SEQ ID NO: 6219 - RNA, 42 nt, synthetic construct
  source 1..42: mol_type = other RNA
cacagtcttctgagttggcagtgatggcatgaactgtggtca

SEQ ID NO: 6220 - RNA, 41 nt, synthetic construct
  source 1..41: mol_type = other RNA
tggcagcgatggcatgggatgtggtcatgagtccttccacg

SEQ ID NO: 6221 - RNA, 39 nt, synthetic construct
  source 1..39: mol_type = other RNA
tggcagcgctggcatggagtggtcatgagtccttccacg

SEQ ID NO: 6222 - RNA, 41 nt, synthetic construct
  source 1..41: mol_type = other RNA
ccggaggggccatccacagtcttctgggtggcagtgatgac

SEQ ID NO: 6223 - RNA, 41 nt, synthetic construct
  source 1..41: mol_type = other RNA
cacagtcttctgggtggcagtgacggcttggactgtggtca

SEQ ID NO: 6224 - RNA, 41 nt, synthetic construct
  source 1..41: mol_type = other RNA
cacagtcttctgggtggcggtgatgcatgcaactgtggtca

SEQ ID NO: 6225 - RNA, 40 nt, synthetic construct
  source 1..40: mol_type = other RNA
tggcagcgatggacggactatggtcatgagtccttccacg

SEQ ID NO: 6226 - RNA, 41 nt, synthetic construct
  source 1..41: mol_type = other RNA
ccggaggggccatccacagtcttctaaacggctgcgatggc

SEQ ID NO: 6227 - RNA, 41 nt, synthetic construct
  source 1..41: mol_type = other RNA
ccggaggggccatccacagtcttctgggtggcagtgatggc

SEQ ID NO: 6228 - RNA, 41 nt, synthetic construct
  source 1..41: mol_type = other RNA
cacagtcttctgggtggcagcgatggtacggactgtggtca

SEQ ID NO: 6229 - RNA, 39 nt, synthetic construct
  source 1..39: mol_type = other RNA
ccggaggggccatccacagttctgggtggcagcgacggc

SEQ ID NO: 6230 - RNA, 41 nt, synthetic construct
  source 1..41: mol_type = other RNA
ccggaggggccatccacagtcttatgggtcgaagtgatagc

SEQ ID NO: 6231 - RNA, 43 nt, synthetic construct
  source 1..43: mol_type = other RNA
ccggaggggccatccacagtgattctgggtggcagcgatggac

SEQ ID NO: 6232 - RNA, 41 nt, synthetic construct
  source 1..41: mol_type = other RNA
tggccgcgatggcatggattgtggtcatgagtccttccacg

SEQ ID NO: 6233 - RNA, 41 nt, synthetic construct
  source 1..41: mol_type = other RNA
aggccgtgagggcatggagtgtggtcatgagtccttccacg

SEQ ID NO: 6234 - RNA, 41 nt, synthetic construct
  source 1..41: mol_type = other RNA
ccggaggggccatccacagtcctatgggtgacaacgatggc

SEQ ID NO: 6235 - RNA, 41 nt, synthetic construct
  source 1..41: mol_type = other RNA
cacagtcttctgggtggcagcgatggctttgactgtggtca

SEQ ID NO: 6236 - RNA, 42 nt, synthetic construct
  source 1..42: mol_type = other RNA
ccggaggggccatccacagtcttctagggtggcagcaatggc

SEQ ID NO: 6237 - RNA, 41 nt, synthetic construct
  source 1..41: mol_type = other RNA
ccggaggggccatccacagtgttctgggtcgcagcaatgga

SEQ ID NO: 6238 - RNA, 41 nt, synthetic construct
  source 1..41: mol_type = other RNA
ccggaggggccatccacagtcctctgggtggcagcgatggt

SEQ ID NO: 6239 - RNA, 42 nt, synthetic construct
  source 1..42: mol_type = other RNA
tggcagcgatggcagaatgccgtggtcatgagtccttccacg

SEQ ID NO: 6240 - RNA, 41 nt, synthetic construct
  source 1..41: mol_type = other RNA
tgagcagcaacggtatgcacttggtcatgagtccttccacg

SEQ ID NO: 6241 - RNA, 41 nt, synthetic construct
  source 1..41: mol_type = other RNA
ccggaggggccatccacagtcctctgggccgcagcaatgga

SEQ ID NO: 6242 - RNA, 41 nt, synthetic construct
  source 1..41: mol_type = other RNA
ccggaggggccatccacagtcttctgggtggcagcgacaga

SEQ ID NO: 6243 - RNA, 41 nt, synthetic construct
  source 1..41: mol_type = other RNA
tggcagcaatggcctggattgtggtcatgagtccttccacg

SEQ ID NO: 6244 - RNA, 42 nt, synthetic construct
  source 1..42: mol_type = other RNA
tggcagcaatggcatgaaaatgtggtcatgagtccttccacg

SEQ ID NO: 6245 - RNA, 41 nt, synthetic construct
  source 1..41: mol_type = other RNA
ccggaggggccatccacagtcttctgggtggcagtgacggc

SEQ ID NO: 6246 - RNA, 41 nt, synthetic construct
  source 1..41: mol_type = other RNA
tggcagcaatggcctggaatgtggtcatgagtccttccacg

SEQ ID NO: 6247 - RNA, 40 nt, synthetic construct
  source 1..40: mol_type = other RNA
cacagtcttctggatgcagcgatggcatggactgtggtca

SEQ ID NO: 6248 - RNA, 42 nt, synthetic construct
  source 1..42: mol_type = other RNA
tggcagcgatggacctggactgtggtcatgagtccttccacg

SEQ ID NO: 6249 - RNA, 41 nt, synthetic construct
  source 1..41: mol_type = other RNA
cacagtcttctgggtggcagcaatggcatggactgtggtca

SEQ ID NO: 6250 - RNA, 41 nt, synthetic construct
  source 1..41: mol_type = other RNA
cacagtcttctgggtggcaacgatggcatggactgtggtca

SEQ ID NO: 6251 - RNA, 41 nt, synthetic construct
  source 1..41: mol_type = other RNA
tggcagcgacggcttggattgtggtcatgagtccttccacg

SEQ ID NO: 6252 - RNA, 41 nt, synthetic construct
  source 1..41: mol_type = other RNA
cacagtcttctgagtggcagtgatggtacagactgtggtca

SEQ ID NO: 6253 - RNA, 41 nt, synthetic construct
  source 1..41: mol_type = other RNA
tggcagcgatgaaatggaccgtggtcatgagtccttccacg

SEQ ID NO: 6254 - RNA, 41 nt, synthetic construct
  source 1..41: mol_type = other RNA
cacagtcttccgggtggcagagatggtatggactgtggtca

SEQ ID NO: 6255 - RNA, 41 nt, synthetic construct
  source 1..41: mol_type = other RNA
tggcagcgatcgcatggactgtggtcatgagtccttccacg

SEQ ID NO: 6256 - RNA, 41 nt, synthetic construct
  source 1..41: mol_type = other RNA
ccggaggggccatccacagtcttctgggttagagcgatagt

SEQ ID NO: 6257 - RNA, 41 nt, synthetic construct
  source 1..41: mol_type = other RNA
tggcagcgatgctatggactgtggtcatgagtccttccacg

SEQ ID NO: 6258 - RNA, 41 nt, synthetic construct
  source 1..41: mol_type = other RNA
ccggaggggccatccacagtcttcggggtgggagtgagggc

SEQ ID NO: 6259 - RNA, 42 nt, synthetic construct
  source 1..42: mol_type = other RNA
ccggaggggccatccacagtcttctggtggtgcagtgatggc

SEQ ID NO: 6260 - RNA, 41 nt, synthetic construct
  source 1..41: mol_type = other RNA
ccggaggggccatccacagtcttccgggtggcagcgacggc

SEQ ID NO: 6261 - RNA, 41 nt, synthetic construct
  source 1..41: mol_type = other RNA
cacagtcttctgggtggcagcgatggtaaggactgtggtca

SEQ ID NO: 6262 - RNA, 41 nt, synthetic construct
  source 1..41: mol_type = other RNA
aggctgcgatgggatggactgtggtcatgagtccttccacg

SEQ ID NO: 6263 - RNA, 41 nt, synthetic construct
  source 1..41: mol_type = other RNA
ccggaggggccatccacagtcttctgggtggcggcaatggc

SEQ ID NO: 6264 - RNA, 42 nt, synthetic construct
  source 1..42: mol_type = other RNA
ccggaggggccatccacagtcctctgagttggcagtgatggc

SEQ ID NO: 6265 - RNA, 46 nt, synthetic construct
  source 1..46: mol_type = other RNA
tcgcagcgatgtccacgcatggcttgtggtcatgagtccttccacg

SEQ ID NO: 6266 - RNA, 42 nt, synthetic construct
  source 1..42: mol_type = other RNA
tggcagcgatggcgactcattgtggtcatgagtccttccacg

SEQ ID NO: 6267 - RNA, 44 nt, synthetic construct
  source 1..44: mol_type = other RNA
cacagtcttctgggtggcagtgatggcagaatgcactgtggtca

SEQ ID NO: 6268 - RNA, 40 nt, synthetic construct
  source 1..40: mol_type = other RNA
tggcagcgatggcatgtctatggtcatgagtccttccacg

SEQ ID NO: 6269 - RNA, 42 nt, synthetic construct
  source 1..42: mol_type = other RNA
tggcagtgatggcatgtccctgtggtcatgagtccttccacg

SEQ ID NO: 6270 - RNA, 41 nt, synthetic construct
  source 1..41: mol_type = other RNA
cacagtcttctgggtggcagcgatggcatgtactgtggtca

SEQ ID NO: 6271 - RNA, 41 nt, synthetic construct
  source 1..41: mol_type = other RNA
ccggaggggccatccacagtattctgggtcgcagtgatggc

SEQ ID NO: 6272 - RNA, 44 nt, synthetic construct
  source 1..44: mol_type = other RNA
tggcagcgatggtatggaggaaagtggtcatgagtccttccacg

SEQ ID NO: 6273 - RNA, 41 nt, synthetic construct
  source 1..41: mol_type = other RNA
tggcagtgacggcttggattgtggtcatgagtccttccacg

SEQ ID NO: 6274 - RNA, 41 nt, synthetic construct
  source 1..41: mol_type = other RNA
tggcggcgatgcatgcaactgtggtcatgagtccttccacg

SEQ ID NO: 6275 - RNA, 41 nt, synthetic construct
  source 1..41: mol_type = other RNA
tggcagcgatggcatggaacgtggtcatgagtccttccacg

SEQ ID NO: 6276 - RNA, 41 nt, synthetic construct
  source 1..41: mol_type = other RNA
ccggaggggccatccacagtcttctgggtggcagcgaaggc

SEQ ID NO: 6277 - RNA, 41 nt, synthetic construct
  source 1..41: mol_type = other RNA
ccggaggggccatccacagttttccgggtggcagtgatggc

SEQ ID NO: 6278 - RNA, 41 nt, synthetic construct
  source 1..41: mol_type = other RNA
ccggaggggccatccacagtcttcagggtggcagcaatggc

SEQ ID NO: 6279 - RNA, 41 nt, synthetic construct
  source 1..41: mol_type = other RNA
tggcagcgacggcatggactctggtcatgagtccttccacg

SEQ ID NO: 6280 - RNA, 41 nt, synthetic construct
  source 1..41: mol_type = other RNA
ccggaggggccatccacagtcctctgggtggcggcgatgaa

SEQ ID NO: 6281 - RNA, 41 nt, synthetic construct
  source 1..41: mol_type = other RNA
tggcggtgatgaaatgggttgtggtcatgagtccttccacg

SEQ ID NO: 6282 - RNA, 42 nt, synthetic construct
  source 1..42: mol_type = other RNA
cacagtcttctgagtgggagtgatggcattggactgtggtca

SEQ ID NO: 6283 - RNA, 41 nt, synthetic construct
  source 1..41: mol_type = other RNA
ccggaggggccatccacagtcttctgggtggcagcgatggc

SEQ ID NO: 6284 - RNA, 40 nt, synthetic construct
  source 1..40: mol_type = other RNA
ccggaggggccatccacagtctctgggtggcagcaatggc

SEQ ID NO: 6285 - RNA, 41 nt, synthetic construct
  source 1..41: mol_type = other RNA
tggcagcaatggaatgggatgtggtcatgagtccttccacg

SEQ ID NO: 6286 - RNA, 41 nt, synthetic construct
  source 1..41: mol_type = other RNA
cacagtcttctgggtggcaatgatggcgtggactgtggtca

SEQ ID NO: 6287 - RNA, 40 nt, synthetic construct
  source 1..40: mol_type = other RNA
tggcccgatggcatggcctgtggtcatgagtccttccacg

SEQ ID NO: 6288 - RNA, 41 nt, synthetic construct
  source 1..41: mol_type = other RNA
ccggaggggccatccacagtactcagggtggccgtgatggc

SEQ ID NO: 6289 - RNA, 41 nt, synthetic construct
  source 1..41: mol_type = other RNA
ccggaggggccatccacagtattctggggggcagcaatggc

SEQ ID NO: 6290 - RNA, 41 nt, synthetic construct
  source 1..41: mol_type = other RNA
tgggagcgatggcgcatcctgtggtcatgagtccttccacg

SEQ ID NO: 6291 - RNA, 41 nt, synthetic construct
  source 1..41: mol_type = other RNA
tgggcgcaatggcatggactgtggtcatgagtccttccacg

SEQ ID NO: 6292 - RNA, 39 nt, synthetic construct
  source 1..39: mol_type = other RNA
tggcagcaatggcatgatgtggtcatgagtccttccacg

SEQ ID NO: 6293 - RNA, 41 nt, synthetic construct
  source 1..41: mol_type = other RNA
tggcaatgatggcatggacagtggtcatgagtccttccacg

SEQ ID NO: 6294 - RNA, 41 nt, synthetic construct
  source 1..41: mol_type = other RNA
ccggaggggccatccacagtcttctgagtggcagtgatggt

SEQ ID NO: 6295 - RNA, 41 nt, synthetic construct
  source 1..41: mol_type = other RNA
ccggaggggccatccacagtcgtctgggtggtagcgatggc

SEQ ID NO: 6296 - RNA, 42 nt, synthetic construct
  source 1..42: mol_type = other RNA
tggcggcgatggcatggaagtgtggtcatgagtccttccacg

SEQ ID NO: 6297 - RNA, 41 nt, synthetic construct
  source 1..41: mol_type = other RNA
ccggaggggccatccacagtcttcggggtggcagcgatggc

SEQ ID NO: 6298 - RNA, 41 nt, synthetic construct
  source 1..41: mol_type = other RNA
tgggagcgatggcatggactatggtcatgagtccttccacg

SEQ ID NO: 6299 - RNA, 45 nt, synthetic construct
  source 1..45: mol_type = other RNA
tggcagcgctggcatctggaccctgtggtcatgagtccttccacg

SEQ ID NO: 6300 - RNA, 41 nt, synthetic construct
  source 1..41: mol_type = other RNA
ccggaggggccatccacagtattcggggtggcagcgatggc

SEQ ID NO: 6301 - RNA, 41 nt, synthetic construct
  source 1..41: mol_type = other RNA
tggcagcactggcacggactgtggtcatgagtccttccacg

SEQ ID NO: 6302 - RNA, 41 nt, synthetic construct
  source 1..41: mol_type = other RNA
cggccgcgatggcttggactgtggtcatgagtccttccacg

SEQ ID NO: 6303 - RNA, 41 nt, synthetic construct
  source 1..41: mol_type = other RNA
tcgaagtgatagcatggtttgtggtcatgagtccttccacg

SEQ ID NO: 6304 - RNA, 41 nt, synthetic construct
  source 1..41: mol_type = other RNA
cacagtcttctgggaggccgtgagggcatggactgtggtca

SEQ ID NO: 6305 - RNA, 40 nt, synthetic construct
  source 1..40: mol_type = other RNA
cacagtcttctggtggcagcgatgaattggactgtggtca

SEQ ID NO: 6306 - RNA, 40 nt, synthetic construct
  source 1..40: mol_type = other RNA
ccggaggggccatccacagtcattgggtgcagaacccggc

SEQ ID NO: 6307 - RNA, 41 nt, synthetic construct
  source 1..41: mol_type = other RNA
gggcagcgatggcataggacgtggtcatgagtccttccacg

SEQ ID NO: 6308 - RNA, 40 nt, synthetic construct
  source 1..40: mol_type = other RNA
tggcagcgatgcgcggcctgtggtcatgagtccttccacg

SEQ ID NO: 6309 - RNA, 41 nt, synthetic construct
  source 1..41: mol_type = other RNA
tggcggcgatggcggacaacgtggtcatgagtccttccacg

SEQ ID NO: 6310 - RNA, 41 nt, synthetic construct
  source 1..41: mol_type = other RNA
tggcagcgatggcatgggacttggtcatgagtccttccacg

SEQ ID NO: 6311 - RNA, 41 nt, synthetic construct
  source 1..41: mol_type = other RNA
tggcagcgatgggctggattgtggtcatgagtccttccacg

SEQ ID NO: 6312 - RNA, 41 nt, synthetic construct
  source 1..41: mol_type = other RNA
ccggaggggccatccacagtcttctgggtggcaacgatggc

SEQ ID NO: 6313 - RNA, 44 nt, synthetic construct
  source 1..44: mol_type = other RNA
ccggaggggccatccacagtcttctgggtggcagcatgaatggc

SEQ ID NO: 6314 - RNA, 44 nt, synthetic construct
  source 1..44: mol_type = other RNA
ccggaggggccatccacagtcttctgggtggcagcacgaatggc

SEQ ID NO: 6315 - RNA, 41 nt, synthetic construct
  source 1..41: mol_type = other RNA
ccggaggggccatccacagtcttgtgggtggcagtgacggc

SEQ ID NO: 6316 - RNA, 44 nt, synthetic construct
  source 1..44: mol_type = other RNA
ccggaggggccatccacagtcttctgggtgacaacaacgatggc

SEQ ID NO: 6317 - RNA, 41 nt, synthetic construct
  source 1..41: mol_type = other RNA
tggcagtaatggcatggactgtggtcatgagtccttccacg

SEQ ID NO: 6318 - RNA, 41 nt, synthetic construct
  source 1..41: mol_type = other RNA
tggcagcgagggcatggacggtggtcatgagtccttccacg

SEQ ID NO: 6319 - RNA, 41 nt, synthetic construct
  source 1..41: mol_type = other RNA
ttagagcgatagtatgaactgtggtcatgagtccttccacg

SEQ ID NO: 6320 - RNA, 41 nt, synthetic construct
  source 1..41: mol_type = other RNA
tgacagtgacagcatggactgtggtcatgagtccttccacg

SEQ ID NO: 6321 - RNA, 42 nt, synthetic construct
  source 1..42: mol_type = other RNA
ccggaggggccatccacagtcttcgtgggtggcagtgatgga

SEQ ID NO: 6322 - RNA, 42 nt, synthetic construct
  source 1..42: mol_type = other RNA
tgggagcgatggcattggactgtggtcatgagtccttccacg

SEQ ID NO: 6323 - RNA, 41 nt, synthetic construct
  source 1..41: mol_type = other RNA
cacagtcttccgggtggcaacgatggcatggactgtggtca

SEQ ID NO: 6324 - RNA, 41 nt, synthetic construct
  source 1..41: mol_type = other RNA
tggcagcgatggtaaggactgtggtcatgagtccttccacg

SEQ ID NO: 6325 - RNA, 41 nt, synthetic construct
  source 1..41: mol_type = other RNA
tggcagtgatgacatggactgtggtcatgagtccttccacg

SEQ ID NO: 6326 - RNA, 41 nt, synthetic construct
  source 1..41: mol_type = other RNA
ccggaggggccatccacagtcttctggttggcagcaatgga

SEQ ID NO: 6327 - RNA, 41 nt, synthetic construct
  source 1..41: mol_type = other RNA
tggcaatgatggcgtggactgtggtcatgagtccttccacg

SEQ ID NO: 6328 - RNA, 41 nt, synthetic construct
  source 1..41: mol_type = other RNA
cacagtcttcggggtggcaacaatgctatggactgtggtca

SEQ ID NO: 6329 - RNA, 42 nt, synthetic construct
  source 1..42: mol_type = other RNA
tggcagcgatggccgatggtagtggtcatgagtccttccacg

SEQ ID NO: 6330 - RNA, 41 nt, synthetic construct
  source 1..41: mol_type = other RNA
tggcggcgatggcatagactgtggtcatgagtccttccacg

SEQ ID NO: 6331 - RNA, 39 nt, synthetic construct
  source 1..39: mol_type = other RNA
tggccgatggcatggcctgtggtcatgagtccttccacg

SEQ ID NO: 6332 - RNA, 41 nt, synthetic construct
  source 1..41: mol_type = other RNA
ccggaggggccatccacagtcttcagggaggcagtgatggg

SEQ ID NO: 6333 - RNA, 42 nt, synthetic construct
  source 1..42: mol_type = other RNA
cgagcagtgacggacatgactgtggtcatgagtccttccacg

SEQ ID NO: 6334 - RNA, 41 nt, synthetic construct
  source 1..41: mol_type = other RNA
ccggaggggccatccacagtctcgtgggtggcagtgatggc

SEQ ID NO: 6335 - RNA, 43 nt, synthetic construct
  source 1..43: mol_type = other RNA
tgcagaacccggcggggtgggcgtggtcatgagtccttccacg

SEQ ID NO: 6336 - RNA, 41 nt, synthetic construct
  source 1..41: mol_type = other RNA
tggcagcgatggcataaacaatggtcatgagtccttccacg

SEQ ID NO: 6337 - RNA, 40 nt, synthetic construct
  source 1..40: mol_type = other RNA
ccggaggggccatccacagtcctagggtggcagcaatggt

SEQ ID NO: 6338 - RNA, 58 nt, synthetic construct
  source 1..58: mol_type = other RNA
tgcgtaagtgtatgtcaccatgcccgccatgggagctgtggtcatgagtccttccacg

SEQ ID NO: 6339 - RNA, 41 nt, synthetic construct
  source 1..41: mol_type = other RNA
cacagtcttctgggtggcaacgatggcctggactgtggtca

SEQ ID NO: 6340 - RNA, 41 nt, synthetic construct
  source 1..41: mol_type = other RNA
tggcagtgacggcgtggactgtggtcatgagtccttccacg

SEQ ID NO: 6341 - RNA, 41 nt, synthetic construct
  source 1..41: mol_type = other RNA
tggcggtgatgcatgcaactgtggtcatgagtccttccacg

SEQ ID NO: 6342 - RNA, 41 nt, synthetic construct
  source 1..41: mol_type = other RNA
tggcagcgatggtatggactgtggtcatgagtccttccacg

SEQ ID NO: 6343 - RNA, 41 nt, synthetic construct
  source 1..41: mol_type = other RNA
ccggaggggccatccacagtcttcttagtggcagcgagggc

SEQ ID NO: 6344 - RNA, 41 nt, synthetic construct
  source 1..41: mol_type = other RNA
ccggaggggccatccacagtcttatgagtggcagtgatgcc

SEQ ID NO: 6345 - RNA, 41 nt, synthetic construct
  source 1..41: mol_type = other RNA
tgggagtgagggcacaacctgtggtcatgagtccttccacg

SEQ ID NO: 6346 - RNA, 41 nt, synthetic construct
  source 1..41: mol_type = other RNA
cacagtcttctaaacggctgcgatggcttggactgtggtca

SEQ ID NO: 6347 - RNA, 41 nt, synthetic construct
  source 1..41: mol_type = other RNA
tgggagtgatggcatggactatggtcatgagtccttccacg

SEQ ID NO: 6348 - RNA, 41 nt, synthetic construct
  source 1..41: mol_type = other RNA
tggcaatgatggcatggacaatggtcatgagtccttccacg

SEQ ID NO: 6349 - RNA, 42 nt, synthetic construct
  source 1..42: mol_type = other RNA
ggtgcagtgatggcatgaactgtggtcatgagtccttccacg

SEQ ID NO: 6350 - RNA, 42 nt, synthetic construct
  source 1..42: mol_type = other RNA
cacagtcttctggaggtgcagtgatggcatgaactgtggtca

SEQ ID NO: 6351 - RNA, 40 nt, synthetic construct
  source 1..40: mol_type = other RNA
tcgcagctggcattggtctgtggtcatgagtccttccacg

SEQ ID NO: 6352 - RNA, 41 nt, synthetic construct
  source 1..41: mol_type = other RNA
tggcagtgacggcattgactgtggtcatgagtccttccacg

SEQ ID NO: 6353 - RNA, 41 nt, synthetic construct
  source 1..41: mol_type = other RNA
tggcagcgatgacatggactgtggtcatgagtccttccacg

SEQ ID NO: 6354 - RNA, 41 nt, synthetic construct
  source 1..41: mol_type = other RNA
tggcaacgatggcgtggactgtggtcatgagtccttccacg

SEQ ID NO: 6355 - RNA, 41 nt, synthetic construct
  source 1..41: mol_type = other RNA
cggacaagatggcctggactgtggtcatgagtccttccacg

SEQ ID NO: 6356 - RNA, 41 nt, synthetic construct
  source 1..41: mol_type = other RNA
tggccgtgatggcatggattgtggtcatgagtccttccacg

SEQ ID NO: 6357 - RNA, 39 nt, synthetic construct
  source 1..39: mol_type = other RNA
ccggaggggccatccacagtcttctgacgcagtactggc

SEQ ID NO: 6358 - RNA, 39 nt, synthetic construct
  source 1..39: mol_type = other RNA
gcagtactggcatggactatggtcatgagtccttccacg

SEQ ID NO: 6359 - RNA, 41 nt, synthetic construct
  source 1..41: mol_type = other RNA
ccggaggggccatccacagtctactgggtggctgcaatggc

SEQ ID NO: 6360 - RNA, 41 nt, synthetic construct
  source 1..41: mol_type = other RNA
ccggaggggccatccacagtattctggggggcagtaatggc

SEQ ID NO: 6361 - RNA, 41 nt, synthetic construct
  source 1..41: mol_type = other RNA
gggcagtaatggcatagaacgtggtcatgagtccttccacg

SEQ ID NO: 6362 - RNA, 41 nt, synthetic construct
  source 1..41: mol_type = other RNA
tcgcagtgatggcctggaatgtggtcatgagtccttccacg

SEQ ID NO: 6363 - RNA, 41 nt, synthetic construct
  source 1..41: mol_type = other RNA
cacagtcttctgggtcgcagtgatggcctggactgtggtca

SEQ ID NO: 6364 - RNA, 44 nt, synthetic construct
  source 1..44: mol_type = other RNA
tggcagcgatggcaacctggactgtggtcatgagtccttccacg

SEQ ID NO: 6365 - RNA, 41 nt, synthetic construct
  source 1..41: mol_type = other RNA
tggcagcaatgtaatggactgtggtcatgagtccttccacg

SEQ ID NO: 6366 - RNA, 41 nt, synthetic construct
  source 1..41: mol_type = other RNA
ccggaggggccatccacagtgttctgggtcgcagtaatgga

SEQ ID NO: 6367 - RNA, 41 nt, synthetic construct
  source 1..41: mol_type = other RNA
tggcagcgatgaaataacctgtggtcatgagtccttccacg

SEQ ID NO: 6368 - RNA, 41 nt, synthetic construct
  source 1..41: mol_type = other RNA
ccggaggggccatccacagtcttctgggtggcagcgacggc

SEQ ID NO: 6369 - RNA, 41 nt, synthetic construct
  source 1..41: mol_type = other RNA
ccggaggggccatccacagtcgtctgggtggtagtgatggc

SEQ ID NO: 6370 - RNA, 41 nt, synthetic construct
  source 1..41: mol_type = other RNA
tggcaacgatggcatggacagtggtcatgagtccttccacg

SEQ ID NO: 6371 - RNA, 41 nt, synthetic construct
  source 1..41: mol_type = other RNA
tggcagtgatggcatggaacgtggtcatgagtccttccacg

SEQ ID NO: 6372 - RNA, 43 nt, synthetic construct
  source 1..43: mol_type = other RNA
cacagtcttctgggtggcagcaccggcatcttgactgtggtca

SEQ ID NO: 6373 - RNA, 40 nt, synthetic construct
  source 1..40: mol_type = other RNA
tggcagtgatggacggactatggtcatgagtccttccacg

SEQ ID NO: 6374 - RNA, 40 nt, synthetic construct
  source 1..40: mol_type = other RNA
cacagtcttctgggtggcagcgttggcaggactgtggtca

SEQ ID NO: 6375 - RNA, 41 nt, synthetic construct
  source 1..41: mol_type = other RNA
ccggaggggccatccacagtcttctgggtgacagtgacagc

SEQ ID NO: 6376 - RNA, 41 nt, synthetic construct
  source 1..41: mol_type = other RNA
tggcagcgatggaccaaaccgtggtcatgagtccttccacg

SEQ ID NO: 6377 - RNA, 41 nt, synthetic construct
  source 1..41: mol_type = other RNA
ccggaggggccatccacagtcctctgggtggcagcaatgga

SEQ ID NO: 6378 - RNA, 41 nt, synthetic construct
  source 1..41: mol_type = other RNA
ccggaggggccatccacagtcttccgggtggcaacgatggc

SEQ ID NO: 6379 - RNA, 41 nt, synthetic construct
  source 1..41: mol_type = other RNA
ccggaggggccatccacagtcttctgggtggcagcgatagc

SEQ ID NO: 6380 - RNA, 41 nt, synthetic construct
  source 1..41: mol_type = other RNA
tggcagcgatagcatggactgtggtcatgagtccttccacg

SEQ ID NO: 6381 - RNA, 41 nt, synthetic construct
  source 1..41: mol_type = other RNA
ccggaggggccatccacagtctctgtggtggcagcgctggc

SEQ ID NO: 6382 - RNA, 42 nt, synthetic construct
  source 1..42: mol_type = other RNA
tgcccagcgatggtatggatggtggtcatgagtccttccacg

SEQ ID NO: 6383 - RNA, 41 nt, synthetic construct
  source 1..41: mol_type = other RNA
tggcagtgatggtacggactgtggtcatgagtccttccacg

SEQ ID NO: 6384 - RNA, 47 nt, synthetic construct
  source 1..47: mol_type = other RNA
tggcagcgatggcttgtccatggaatgtggtcatgagtccttccacg

SEQ ID NO: 6385 - RNA, 41 nt, synthetic construct
  source 1..41: mol_type = other RNA
cacagtcttctgggtggcaacgatggcgtggactgtggtca

SEQ ID NO: 6386 - RNA, 41 nt, synthetic construct
  source 1..41: mol_type = other RNA
ccgcagcaatggaatagactgtggtcatgagtccttccacg

SEQ ID NO: 6387 - RNA, 40 nt, synthetic construct
  source 1..40: mol_type = other RNA
cacagtcttctgagtgtagcaatggcctggactgtggtca

SEQ ID NO: 6388 - RNA, 41 nt, synthetic construct
  source 1..41: mol_type = other RNA
cacagtcttctcagtggcagcactggtatgaactgtggtca

SEQ ID NO: 6389 - RNA, 40 nt, synthetic construct
  source 1..40: mol_type = other RNA
ccggaggggccatccacagtattctgaatggcccgatggc

SEQ ID NO: 6390 - RNA, 43 nt, synthetic construct
  source 1..43: mol_type = other RNA
ccggaggggccatccacagtcttctgggcgagcagtgacggac

SEQ ID NO: 6391 - RNA, 41 nt, synthetic construct
  source 1..41: mol_type = other RNA
aggccgcgagggcatggagtgtggtcatgagtccttccacg

SEQ ID NO: 6392 - RNA, 43 nt, synthetic construct
  source 1..43: mol_type = other RNA
tgcagcacccggcggggtgggcgtggtcatgagtccttccacg

SEQ ID NO: 6393 - RNA, 39 nt, synthetic construct
  source 1..39: mol_type = other RNA
cacagtcttcgggtggcagcaatggtatgactgtggtca

SEQ ID NO: 6394 - RNA, 41 nt, synthetic construct
  source 1..41: mol_type = other RNA
tggccgcgatggcatgaattgtggtcatgagtccttccacg

SEQ ID NO: 6395 - RNA, 44 nt, synthetic construct
  source 1..44: mol_type = other RNA
tggcagcacgaatggcatgggacgtggtcatgagtccttccacg

SEQ ID NO: 6396 - RNA, 41 nt, synthetic construct
  source 1..41: mol_type = other RNA
tggcagcgacggcgtggactgtggtcatgagtccttccacg

SEQ ID NO: 6397 - RNA, 41 nt, synthetic construct
  source 1..41: mol_type = other RNA
tggcagtgatgaaatggaccgtggtcatgagtccttccacg

SEQ ID NO: 6398 - RNA, 41 nt, synthetic construct
  source 1..41: mol_type = other RNA
tggcagcgatgaaatgcattatggtcatgagtccttccacg

SEQ ID NO: 6399 - RNA, 41 nt, synthetic construct
  source 1..41: mol_type = other RNA
cacagtcttcagggtggcagcaatggcatggactgtggtca

SEQ ID NO: 6400 - RNA, 41 nt, synthetic construct
  source 1..41: mol_type = other RNA
tgacagcgacagcatggactgtggtcatgagtccttccacg

SEQ ID NO: 6401 - RNA, 41 nt, synthetic construct
  source 1..41: mol_type = other RNA
tgggagcgagggcacaacctgtggtcatgagtccttccacg

SEQ ID NO: 6402 - RNA, 41 nt, synthetic construct
  source 1..41: mol_type = other RNA
ccggaggggccatccacagtcttctgggtggcagtgatagc

SEQ ID NO: 6403 - RNA, 45 nt, synthetic construct
  source 1..45: mol_type = other RNA
tggcagtgctggcatctggaccctgtggtcatgagtccttccacg

SEQ ID NO: 6404 - RNA, 41 nt, synthetic construct
  source 1..41: mol_type = other RNA
cacagtcttctgggtggcagcgatggcacggactgtggtca

SEQ ID NO: 6405 - RNA, 41 nt, synthetic construct
  source 1..41: mol_type = other RNA
tggaagcaatagcatgaactgtggtcatgagtccttccacg

SEQ ID NO: 6406 - RNA, 41 nt, synthetic construct
  source 1..41: mol_type = other RNA
cacagtcttctgggtggcagcgatggcatgaactgtggtca

SEQ ID NO: 6407 - RNA, 41 nt, synthetic construct
  source 1..41: mol_type = other RNA
cacagtcttctaaatggcagtactggcacggactgtggtca

SEQ ID NO: 6408 - RNA, 41 nt, synthetic construct
  source 1..41: mol_type = other RNA
tcgaagcgatagcatggtttgtggtcatgagtccttccacg

SEQ ID NO: 6409 - RNA, 41 nt, synthetic construct
  source 1..41: mol_type = other RNA
ccggaggggccatccacagtcttgggggtggcaacaatgct

SEQ ID NO: 6410 - RNA, 41 nt, synthetic construct
  source 1..41: mol_type = other RNA
cggacaagctggcctggactgtggtcatgagtccttccacg

SEQ ID NO: 6411 - RNA, 41 nt, synthetic construct
  source 1..41: mol_type = other RNA
ccggaggggccatccacagtctactgggtggcggcaatggc

SEQ ID NO: 6412 - RNA, 39 nt, synthetic construct
  source 1..39: mol_type = other RNA
cacagtcttctgacgcagtactggcatggactgtggtca

SEQ ID NO: 6413 - RNA, 39 nt, synthetic construct
  source 1..39: mol_type = other RNA
cacagtcttctgacgcagcactggcatggactgtggtca

SEQ ID NO: 6414 - RNA, 41 nt, synthetic construct
  source 1..41: mol_type = other RNA
cacagtcttctcagtggcagtactggtatgaactgtggtca

SEQ ID NO: 6415 - RNA, 39 nt, synthetic construct
  source 1..39: mol_type = other RNA
ccggaggggccatccacagtattctgaatggccgatggc

SEQ ID NO: 6416 - RNA, 41 nt, synthetic construct
  source 1..41: mol_type = other RNA
tggcagcgatgaattggaccgtggtcatgagtccttccacg

SEQ ID NO: 6417 - RNA, 42 nt, synthetic construct
  source 1..42: mol_type = other RNA
tggcggcaatggcatggacatgtggtcatgagtccttccacg

SEQ ID NO: 6418 - RNA, 58 nt, synthetic construct
  source 1..58: mol_type = other RNA
tgcgtaagcgtatgtcaccatgcccgccatgggagctgtggtcatgagtccttccacg

SEQ ID NO: 6419 - RNA, 41 nt, synthetic construct
  source 1..41: mol_type = other RNA
tggcagtgatgaaataacctgtggtcatgagtccttccacg

SEQ ID NO: 6420 - RNA, 42 nt, synthetic construct
  source 1..42: mol_type = other RNA
tggcaatgatggcctggacgcgtggtcatgagtccttccacg

SEQ ID NO: 6421 - RNA, 41 nt, synthetic construct
  source 1..41: mol_type = other RNA
cacagtcttctgggtggcaatgatggcctggactgtggtca

SEQ ID NO: 6422 - RNA, 42 nt, synthetic construct
  source 1..42: mol_type = other RNA
tggcagtgatggcagaatgccgtggtcatgagtccttccacg

SEQ ID NO: 6423 - RNA, 44 nt, synthetic construct
  source 1..44: mol_type = other RNA
tggcagcatgaatggcatgggacgtggtcatgagtccttccacg

SEQ ID NO: 6424 - RNA, 41 nt, synthetic construct
  source 1..41: mol_type = other RNA
tggcagtgatgacatggattgtggtcatgagtccttccacg

SEQ ID NO: 6425 - RNA, 41 nt, synthetic construct
  source 1..41: mol_type = other RNA
tggcagtgatgaaatgcattatggtcatgagtccttccacg

SEQ ID NO: 6426 - RNA, 41 nt, synthetic construct
  source 1..41: mol_type = other RNA
tggcagcgttggcaggtgctgtggtcatgagtccttccacg

SEQ ID NO: 6427 - RNA, 41 nt, synthetic construct
  source 1..41: mol_type = other RNA
tggcagagatggtatggactgtggtcatgagtccttccacg

SEQ ID NO: 6428 - RNA, 41 nt, synthetic construct
  source 1..41: mol_type = other RNA
ttagagtgatagtatgaactgtggtcatgagtccttccacg

SEQ ID NO: 6429 - RNA, 41 nt, synthetic construct
  source 1..41: mol_type = other RNA
cacagtcttctgggttagagtgatagtatgaactgtggtca

SEQ ID NO: 6430 - RNA, 41 nt, synthetic construct
  source 1..41: mol_type = other RNA
ccggaggggccatccacagtcttctgcgtggcagcagtggc

SEQ ID NO: 6431 - RNA, 41 nt, synthetic construct
  source 1..41: mol_type = other RNA
tggcagtgatgctatggactgtggtcatgagtccttccacg

SEQ ID NO: 6432 - RNA, 39 nt, synthetic construct
  source 1..39: mol_type = other RNA
tggcagcgctggcatagtgtggtcatgagtccttccacg

SEQ ID NO: 6433 - RNA, 42 nt, synthetic construct
  source 1..42: mol_type = other RNA
ccggaggggccatccacagtcttctgggtggcagcgatggtc

SEQ ID NO: 6434 - RNA, 41 nt, synthetic construct
  source 1..41: mol_type = other RNA
tggcaacgatggcatggacaatggtcatgagtccttccacg

SEQ ID NO: 6435 - RNA, 46 nt, synthetic construct
  source 1..46: mol_type = other RNA
tggcggcgatagcatggacccaactctggtcatgagtccttccacg

SEQ ID NO: 6436 - RNA, 41 nt, synthetic construct
  source 1..41: mol_type = other RNA
tggcagcgatggcatggactgtggtcatgagtccttccacg

SEQ ID NO: 6437 - RNA, 41 nt, synthetic construct
  source 1..41: mol_type = other RNA
ccggaggggccatccacagtcttctaaatggcagcactggc

SEQ ID NO: 6438 - RNA, 42 nt, synthetic construct
  source 1..42: mol_type = other RNA
tggcatcaatggcatggccctgtggtcatgagtccttccacg

SEQ ID NO: 6439 - RNA, 41 nt, synthetic construct
  source 1..41: mol_type = other RNA
cacagtcttctgggtcgaagtgatagcatggactgtggtca

SEQ ID NO: 6440 - RNA, 41 nt, synthetic construct
  source 1..41: mol_type = other RNA
tggcagcgacagaatggactgtggtcatgagtccttccacg

SEQ ID NO: 6441 - RNA, 41 nt, synthetic construct
  source 1..41: mol_type = other RNA
ccggaggggccatccacagtattctgggtggccgtgatggc

SEQ ID NO: 6442 - RNA, 41 nt, synthetic construct
  source 1..41: mol_type = other RNA
cacagtcttctgggaggcagccatggcatggactgtggtca

SEQ ID NO: 6443 - RNA, 41 nt, synthetic construct
  source 1..41: mol_type = other RNA
ccggaggggccatccacagtcctctgggtggcagccatggc

SEQ ID NO: 6444 - RNA, 41 nt, synthetic construct
  source 1..41: mol_type = other RNA
ccggaggggccatccacagtagcatgggtggcggcaatggc

SEQ ID NO: 6445 - RNA, 41 nt, synthetic construct
  source 1..41: mol_type = other RNA
tggcggtgatggcggacaacgtggtcatgagtccttccacg

SEQ ID NO: 6446 - RNA, 41 nt, synthetic construct
  source 1..41: mol_type = other RNA
tggcggcgatggcacatggcttggtcatgagtccttccacg

SEQ ID NO: 6447 - RNA, 41 nt, synthetic construct
  source 1..41: mol_type = other RNA
tggcagtgatgggctggattgtggtcatgagtccttccacg

SEQ ID NO: 6448 - RNA, 44 nt, synthetic construct
  source 1..44: mol_type = other RNA
cacagtcttctgggtggcagcatgaatggcatggactgtggtca

SEQ ID NO: 6449 - RNA, 44 nt, synthetic construct
  source 1..44: mol_type = other RNA
cacagtcttctgggtggcagcacgaatggcatggactgtggtca

SEQ ID NO: 6450 - RNA, 44 nt, synthetic construct
  source 1..44: mol_type = other RNA
cacagtcttctgggtgacaacaacgatggcatggactgtggtca

SEQ ID NO: 6451 - RNA, 40 nt, synthetic construct
  source 1..40: mol_type = other RNA
cacagtcttctgggtggcagagttggcaggactgtggtca

SEQ ID NO: 6452 - RNA, 41 nt, synthetic construct
  source 1..41: mol_type = other RNA
tggcagtgacggcatggactctggtcatgagtccttccacg

SEQ ID NO: 6453 - RNA, 38 nt, synthetic construct
  source 1..38: mol_type = other RNA
tacggccgatgtggacactggtcatgagtccttccacg

SEQ ID NO: 6454 - RNA, 38 nt, synthetic construct
  source 1..38: mol_type = other RNA
cacagtcttctgggtacggctgatgtggactgtggtca

SEQ ID NO: 6455 - RNA, 41 nt, synthetic construct
  source 1..41: mol_type = other RNA
tggcagtgatggaccaaaccgtggtcatgagtccttccacg

SEQ ID NO: 6456 - RNA, 42 nt, synthetic construct
  source 1..42: mol_type = other RNA
tgggagtgatggcattggactgtggtcatgagtccttccacg

SEQ ID NO: 6457 - RNA, 41 nt, synthetic construct
  source 1..41: mol_type = other RNA
tggcagtgatggaatggagtgtggtcatgagtccttccacg

SEQ ID NO: 6458 - RNA, 41 nt, synthetic construct
  source 1..41: mol_type = other RNA
cacagtcttcggggtgggagtgagggcacaaactgtggtca

SEQ ID NO: 6459 - RNA, 41 nt, synthetic construct
  source 1..41: mol_type = other RNA
cggctgcgatggcttggactgtggtcatgagtccttccacg

SEQ ID NO: 6460 - RNA, 41 nt, synthetic construct
  source 1..41: mol_type = other RNA
cacagtcttccgggtggcaatgatggcatggactgtggtca

SEQ ID NO: 6461 - RNA, 44 nt, synthetic construct
  source 1..44: mol_type = other RNA
cacagtcttctgtggtggcagtgctggcatctggactgtggtca

SEQ ID NO: 6462 - RNA, 41 nt, synthetic construct
  source 1..41: mol_type = other RNA
ccggaggggccatccacagtcttatgggtggaagcaatagc

SEQ ID NO: 6463 - RNA, 41 nt, synthetic construct
  source 1..41: mol_type = other RNA
ccggaggggccatccacagtcttctgggtggcagtgatggt

SEQ ID NO: 6464 - RNA, 39 nt, synthetic construct
  source 1..39: mol_type = other RNA
cacagtcttctcgtcgcagctggcattggactgtggtca

SEQ ID NO: 6465 - RNA, 41 nt, synthetic construct
  source 1..41: mol_type = other RNA
cacagtcttctaaatggcagcactggcacggactgtggtca

SEQ ID NO: 6466 - RNA, 39 nt, synthetic construct
  source 1..39: mol_type = other RNA
tgcagcgatggcatggacttggtcatgagtccttccacg

SEQ ID NO: 6467 - RNA, 41 nt, synthetic construct
  source 1..41: mol_type = other RNA
ccggaggggccatccacagtcttctgatcggacaagatggc

SEQ ID NO: 6468 - RNA, 41 nt, synthetic construct
  source 1..41: mol_type = other RNA
cacagtcttctgatcggacaagatggcctggactgtggtca

SEQ ID NO: 6469 - RNA, 39 nt, synthetic construct
  source 1..39: mol_type = other RNA
gcagcactggcatggactatggtcatgagtccttccacg

SEQ ID NO: 6470 - RNA, 40 nt, synthetic construct
  source 1..40: mol_type = other RNA
tgtagcaatggcctggactgtggtcatgagtccttccacg

SEQ ID NO: 6471 - RNA, 41 nt, synthetic construct
  source 1..41: mol_type = other RNA
tggcggtgatggcatagactgtggtcatgagtccttccacg

SEQ ID NO: 6472 - RNA, 42 nt, synthetic construct
  source 1..42: mol_type = other RNA
tcagcagcgacggcacagaccgtggtcatgagtccttccacg

SEQ ID NO: 6473 - RNA, 41 nt, synthetic construct
  source 1..41: mol_type = other RNA
ccggaggggccatccacagtcttctgggaggcagccatggc

SEQ ID NO: 6474 - RNA, 41 nt, synthetic construct
  source 1..41: mol_type = other RNA
tggcagcactggtatgaactgtggtcatgagtccttccacg

SEQ ID NO: 6475 - RNA, 41 nt, synthetic construct
  source 1..41: mol_type = other RNA
tggcagtactggtatgaactgtggtcatgagtccttccacg

SEQ ID NO: 6476 - RNA, 42 nt, synthetic construct
  source 1..42: mol_type = other RNA
tggccacaatggacacggcctgtggtcatgagtccttccacg

SEQ ID NO: 6477 - RNA, 45 nt, synthetic construct
  source 1..45: mol_type = other RNA
tggcagcaatggtctacatggactgtggtcatgagtccttccacg

SEQ ID NO: 6478 - RNA, 43 nt, synthetic construct
  source 1..43: mol_type = other RNA
cacagtcttcgggtgcagaacccggcggggtggactgtggtca

SEQ ID NO: 6479 - RNA, 43 nt, synthetic construct
  source 1..43: mol_type = other RNA
cacagtcttcgggtgcagcacccggcggggtggactgtggtca

SEQ ID NO: 6480 - RNA, 41 nt, synthetic construct
  source 1..41: mol_type = other RNA
tggcatcgatggcatggacggtggtcatgagtccttccacg

SEQ ID NO: 6481 - RNA, 43 nt, synthetic construct
  source 1..43: mol_type = other RNA
tggcagcaccggcatcttgatattggtcatgagtccttccacg

SEQ ID NO: 6482 - RNA, 44 nt, synthetic construct
  source 1..44: mol_type = other RNA
cacagtcttctgggtgacaacaatgatggcatggactgtggtca

SEQ ID NO: 6483 - RNA, 39 nt, synthetic construct
  source 1..39: mol_type = other RNA
ccggaggggccatccacagtcttctgggtacggctgatg

SEQ ID NO: 6484 - RNA, 38 nt, synthetic construct
  source 1..38: mol_type = other RNA
tacggctgatgtggacactggtcatgagtccttccacg

SEQ ID NO: 6485 - RNA, 41 nt, synthetic construct
  source 1..41: mol_type = other RNA
tggcggcgatgaaatgggttgtggtcatgagtccttccacg

SEQ ID NO: 6486 - RNA, 41 nt, synthetic construct
  source 1..41: mol_type = other RNA
cacagtcttctgggtgggcacaatggcatggactgtggtca

SEQ ID NO: 6487 - RNA, 41 nt, synthetic construct
  source 1..41: mol_type = other RNA
cacagtcttctgggtgggcaccatggcatggactgtggtca

SEQ ID NO: 6488 - RNA, 41 nt, synthetic construct
  source 1..41: mol_type = other RNA
cggctgtgatggcttggactgtggtcatgagtccttccacg

SEQ ID NO: 6489 - RNA, 41 nt, synthetic construct
  source 1..41: mol_type = other RNA
cacagtcttctaaacggctgtgatggcttggactgtggtca

SEQ ID NO: 6490 - RNA, 41 nt, synthetic construct
  source 1..41: mol_type = other RNA
tggcagtgatagcatggactgtggtcatgagtccttccacg

SEQ ID NO: 6491 - RNA, 38 nt, synthetic construct
  source 1..38: mol_type = other RNA
ccggaggggccatccacagtcttctcgtcgcagctggc

SEQ ID NO: 6492 - RNA, 41 nt, synthetic construct
  source 1..41: mol_type = other RNA
ccggaggggccatccacagtcttctgggtggcatcaatggc

SEQ ID NO: 6493 - RNA, 39 nt, synthetic construct
  source 1..39: mol_type = other RNA
cacagtcttcaggtgcagcaatggcatggactgtggtca

SEQ ID NO: 6494 - RNA, 41 nt, synthetic construct
  source 1..41: mol_type = other RNA
tggcaacaatgctatggactgtggtcatgagtccttccacg

SEQ ID NO: 6495 - RNA, 41 nt, synthetic construct
  source 1..41: mol_type = other RNA
cacagtcttctgatcggacaagctggcctggactgtggtca

SEQ ID NO: 6496 - RNA, 40 nt, synthetic construct
  source 1..40: mol_type = other RNA
cacagtcttctgaatggcccgatggcatggactgtggtca

SEQ ID NO: 6497 - RNA, 42 nt, synthetic construct
  source 1..42: mol_type = other RNA
cacagtcttcggggtggccacaatggacacggactgtggtca

SEQ ID NO: 6498 - RNA, 41 nt, synthetic construct
  source 1..41: mol_type = other RNA
ccggaggggccatccacagtcttctgggtgggcgcaatggc

SEQ ID NO: 6499 - RNA, 41 nt, synthetic construct
  source 1..41: mol_type = other RNA
tggcagtgatggcataaacaatggtcatgagtccttccacg

SEQ ID NO: 6500 - RNA, 42 nt, synthetic construct
  source 1..42: mol_type = other RNA
tggcagtgatggcgactcattgtggtcatgagtccttccacg

SEQ ID NO: 6501 - RNA, 59 nt, synthetic construct
  source 1..59: mol_type = other RNA
ttgaagcttctctgcccatttttaactatggtgaatctgtggtcatgagtccttccacg

SEQ ID NO: 6502 - RNA, 59 nt, synthetic construct
  source 1..59: mol_type = other RNA
ttgaagcttctccgcccatttttaactatggtgaatctgtggtcatgagtccttccacg

SEQ ID NO: 6503 - RNA, 42 nt, synthetic construct
  source 1..42: mol_type = other RNA
tggcaacgatggcctggacgcgtggtcatgagtccttccacg

SEQ ID NO: 6504 - RNA, 41 nt, synthetic construct
  source 1..41: mol_type = other RNA
ccggaggggccatccacagtccgctgggtggcagcgatggc

SEQ ID NO: 6505 - RNA, 41 nt, synthetic construct
  source 1..41: mol_type = other RNA
ccggaggggccatccacagtcttctgggtggcagcaccggc

SEQ ID NO: 6506 - RNA, 44 nt, synthetic construct
  source 1..44: mol_type = other RNA
tgacaacaacgatggcatgggctgtggtcatgagtccttccacg

SEQ ID NO: 6507 - RNA, 38 nt, synthetic construct
  source 1..38: mol_type = other RNA
cacagtcttctgggtacggccgatgtggactgtggtca

SEQ ID NO: 6508 - RNA, 46 nt, synthetic construct
  source 1..46: mol_type = other RNA
tggcggtgatagcatggacccaactctggtcatgagtccttccacg

SEQ ID NO: 6509 - RNA, 41 nt, synthetic construct
  source 1..41: mol_type = other RNA
ccggaggggccatccacagtctctgtggtggcagtgctggc

SEQ ID NO: 6510 - RNA, 42 nt, synthetic construct
  source 1..42: mol_type = other RNA
ccggaggggccatccacagtcctctgggtgagcagcaacggt

SEQ ID NO: 6511 - RNA, 41 nt, synthetic construct
  source 1..41: mol_type = other RNA
cacagtcttctgggtggcatcaatggcatggactgtggtca

SEQ ID NO: 6512 - RNA, 41 nt, synthetic construct
  source 1..41: mol_type = other RNA
ccggaggggccatccacagtcttctgatcggacaagctggc

SEQ ID NO: 6513 - RNA, 42 nt, synthetic construct
  source 1..42: mol_type = other RNA
tggcagtgatggccgatggtagtggtcatgagtccttccacg

SEQ ID NO: 6514 - RNA, 39 nt, synthetic construct
  source 1..39: mol_type = other RNA
cacagtcttctgaatggccgatggcatggactgtggtca

SEQ ID NO: 6515 - RNA, 41 nt, synthetic construct
  source 1..41: mol_type = other RNA
ccggaggggccatccacagttttcggggtggccacaatgga

SEQ ID NO: 6516 - RNA, 41 nt, synthetic construct
  source 1..41: mol_type = other RNA
tggcggtgatggcacatggcttggtcatgagtccttccacg

SEQ ID NO: 6517 - RNA, 41 nt, synthetic construct
  source 1..41: mol_type = other RNA
ccggaggggccatccacagtcttccgggtggcagagatggt

SEQ ID NO: 6518 - RNA, 41 nt, synthetic construct
  source 1..41: mol_type = other RNA
ccggaggggccatccacagtcctctgggtggcggtgatgaa

SEQ ID NO: 6519 - RNA, 41 nt, synthetic construct
  source 1..41: mol_type = other RNA
tggctgcaatggcatggactgtggtcatgagtccttccacg

SEQ ID NO: 6520 - RNA, 41 nt, synthetic construct
  source 1..41: mol_type = other RNA
ccggaggggccatccacagtggtctcagtggcagtactggt

SEQ ID NO: 6521 - RNA, 41 nt, synthetic construct
  source 1..41: mol_type = other RNA
gctatctgagcagcgcccatggtgggcgcagcgcctcacaa

SEQ ID NO: 6522 - RNA, 41 nt, synthetic construct
  source 1..41: mol_type = other RNA
gctatctgagcagcgcccatggttagggcagcgcctcacaa

SEQ ID NO: 6523 - RNA, 41 nt, synthetic construct
  source 1..41: mol_type = other RNA
gctatctgagcagcgctactgctgggggccgcgcctcacaa

SEQ ID NO: 6524 - RNA, 41 nt, synthetic construct
  source 1..41: mol_type = other RNA
gctatctgagcagcgctcctggtgggggcagcgcctcacaa

SEQ ID NO: 6525 - RNA, 41 nt, synthetic construct
  source 1..41: mol_type = other RNA
gctatctgagcagcgctcatgctggcggcagcgcctcacaa

SEQ ID NO: 6526 - RNA, 42 nt, synthetic construct
  source 1..42: mol_type = other RNA
gctatctgagcagcgaggaatggtgggggcagcgcctcacaa

SEQ ID NO: 6527 - RNA, 41 nt, synthetic construct
  source 1..41: mol_type = other RNA
gctatctgagcagcgctcatggtagggggagcgcctcacaa

SEQ ID NO: 6528 - RNA, 41 nt, synthetic construct
  source 1..41: mol_type = other RNA
gctatctgagcagcgctcctggtggggggagcgcctcacaa

SEQ ID NO: 6529 - RNA, 41 nt, synthetic construct
  source 1..41: mol_type = other RNA
gctatctgaacagtgctcatggtgagggcagcgcctcacaa

SEQ ID NO: 6530 - RNA, 40 nt, synthetic construct
  source 1..40: mol_type = other RNA
gctatctgagcagcgctcatggtgaggcagcgcctcacaa

SEQ ID NO: 6531 - RNA, 43 nt, synthetic construct
  source 1..43: mol_type = other RNA
gctatctgagcaacgctcatgggtgaacagcagcgcctcacaa

SEQ ID NO: 6532 - RNA, 41 nt, synthetic construct
  source 1..41: mol_type = other RNA
gctatctgaacagctttcatgggaggggcagcgcctcacaa

SEQ ID NO: 6533 - RNA, 41 nt, synthetic construct
  source 1..41: mol_type = other RNA
gctatctgagtagcgctcatggcggaggccgcgcctcacaa

SEQ ID NO: 6534 - RNA, 41 nt, synthetic construct
  source 1..41: mol_type = other RNA
gctatctgagcagcggtcatggggggggcagcgcctcacaa

SEQ ID NO: 6535 - RNA, 41 nt, synthetic construct
  source 1..41: mol_type = other RNA
gctatctgagcagcgttcatggtaggggcagcgcctcacaa

SEQ ID NO: 6536 - RNA, 41 nt, synthetic construct
  source 1..41: mol_type = other RNA
gctatctgagcagcgctcatggtgggggcggcgcctcacaa

SEQ ID NO: 6537 - RNA, 41 nt, synthetic construct
  source 1..41: mol_type = other RNA
gctatctgagcagcgctcatggagggggcagcgcctcacaa

SEQ ID NO: 6538 - RNA, 41 nt, synthetic construct
  source 1..41: mol_type = other RNA
gctatctgagcaacgctcatggtggtggcagcgcctcacaa

SEQ ID NO: 6539 - RNA, 41 nt, synthetic construct
  source 1..41: mol_type = other RNA
gctatctgaacagcgctcgtagtgggggaagcacctcacaa

SEQ ID NO: 6540 - RNA, 41 nt, synthetic construct
  source 1..41: mol_type = other RNA
gcgctcatggtgggcgcagcacctcccatcctccgtcatgt

SEQ ID NO: 6541 - RNA, 41 nt, synthetic construct
  source 1..41: mol_type = other RNA
gctatctgagcagcgctactggcgggggcagcgcctcacaa

SEQ ID NO: 6542 - RNA, 41 nt, synthetic construct
  source 1..41: mol_type = other RNA
gctatctgaacagcgctcatggttggggcagcacctcacaa

SEQ ID NO: 6543 - RNA, 41 nt, synthetic construct
  source 1..41: mol_type = other RNA
gctatctgagcagcgaccaaggtggggacagcgcctcacaa

SEQ ID NO: 6544 - RNA, 41 nt, synthetic construct
  source 1..41: mol_type = other RNA
gctatctgagcagcgctcatggtgtgggcagcacctcacaa

SEQ ID NO: 6545 - RNA, 41 nt, synthetic construct
  source 1..41: mol_type = other RNA
gctatctgagcagcgctcatggtgggggcagcgcctcacaa

SEQ ID NO: 6546 - RNA, 41 nt, synthetic construct
  source 1..41: mol_type = other RNA
gctatctgagcagcgctcatgatgggggcagcgcctcacaa

SEQ ID NO: 6547 - RNA, 41 nt, synthetic construct
  source 1..41: mol_type = other RNA
gctatctgaacagcggtcatggtgggggcagcgcctcacaa

SEQ ID NO: 6548 - RNA, 41 nt, synthetic construct
  source 1..41: mol_type = other RNA
gctatctgagcagcgctcatgctgggggcagcacctcacaa

SEQ ID NO: 6549 - RNA, 41 nt, synthetic construct
  source 1..41: mol_type = other RNA
gcgctcatggcggaggccgcgccttagaacctccgtcatgt

SEQ ID NO: 6550 - RNA, 41 nt, synthetic construct
  source 1..41: mol_type = other RNA
gctatctgagtagcgttcatggcaaaggctgcgcctcacaa

SEQ ID NO: 6551 - RNA, 41 nt, synthetic construct
  source 1..41: mol_type = other RNA
gctatctgaacagctctaatgatgggggccgcgcctcacaa

SEQ ID NO: 6552 - RNA, 31 nt, synthetic construct
  source 1..31: mol_type = other RNA
cgctcatggtgagggcagcgcctaccaacct

SEQ ID NO: 6553 - RNA, 41 nt, synthetic construct
  source 1..41: mol_type = other RNA
gctatctgagcagcgtccatggtgggggcagcgcctcacaa

SEQ ID NO: 6554 - RNA, 41 nt, synthetic construct
  source 1..41: mol_type = other RNA
gctatctgagcagcgctcgtggtgggggcagcacctcacaa

SEQ ID NO: 6555 - RNA, 41 nt, synthetic construct
  source 1..41: mol_type = other RNA
gctatctgagctgcgctcgtggtgggggcagcgcctcacaa

SEQ ID NO: 6556 - RNA, 41 nt, synthetic construct
  source 1..41: mol_type = other RNA
gctatctgagcagagctcatggtggaggcagcgcctcacaa

SEQ ID NO: 6557 - RNA, 42 nt, synthetic construct
  source 1..42: mol_type = other RNA
gctatctgagtaacgctcatgggtgggggcagcgcctcacaa

SEQ ID NO: 6558 - RNA, 31 nt, synthetic construct
  source 1..31: mol_type = other RNA
gagcagcgctcatggtgggggcggcgcctca

SEQ ID NO: 6559 - RNA, 42 nt, synthetic construct
  source 1..42: mol_type = other RNA
gctatctgagcagagctcatggtggagagcagcgcctcacaa

SEQ ID NO: 6560 - RNA, 42 nt, synthetic construct
  source 1..42: mol_type = other RNA
gctatctgaacagcgttcatggtgtagtgcagcgcctcacaa

SEQ ID NO: 6561 - RNA, 41 nt, synthetic construct
  source 1..41: mol_type = other RNA
gctatctgagcagcgcacatggtgggggcagcgcctcacaa

SEQ ID NO: 6562 - RNA, 41 nt, synthetic construct
  source 1..41: mol_type = other RNA
tgagcagcgctcatggcggaggccgcgccttagaacctccg

SEQ ID NO: 6563 - RNA, 41 nt, synthetic construct
  source 1..41: mol_type = other RNA
gctatctgagtagcgctcatggtgagggcagcgcctcacaa

SEQ ID NO: 6564 - RNA, 41 nt, synthetic construct
  source 1..41: mol_type = other RNA
gcgctcatggcggcggctgcgcctctcaacctccgtcatgt

SEQ ID NO: 6565 - RNA, 41 nt, synthetic construct
  source 1..41: mol_type = other RNA
gctatctgagcagagcttatggtgggggcagcgcctcacaa

SEQ ID NO: 6566 - RNA, 41 nt, synthetic construct
  source 1..41: mol_type = other RNA
gctatctgaacagcgctcgttgtgggcgaagcgcctcacaa

SEQ ID NO: 6567 - RNA, 41 nt, synthetic construct
  source 1..41: mol_type = other RNA
gctatctgagcagcgctcatggtgggggcggcacctcacaa

SEQ ID NO: 6568 - RNA, 41 nt, synthetic construct
  source 1..41: mol_type = other RNA
gctatctgagcagcgctcatgatgggggcagcacctcacaa

SEQ ID NO: 6569 - RNA, 41 nt, synthetic construct
  source 1..41: mol_type = other RNA
tgagcagcgctcatggtgggggcagcgccttacaacctccg

SEQ ID NO: 6570 - RNA, 41 nt, synthetic construct
  source 1..41: mol_type = other RNA
gctatctgagctgcgctcatggtgggggccgcgcctcacaa

SEQ ID NO: 6571 - RNA, 41 nt, synthetic construct
  source 1..41: mol_type = other RNA
tgagcagcgctcatggtgggggcagcgcctaccaacctccg

SEQ ID NO: 6572 - RNA, 41 nt, synthetic construct
  source 1..41: mol_type = other RNA
gctatctgagacgcgctcatggtgggggcagcgcctcacaa

SEQ ID NO: 6573 - RNA, 41 nt, synthetic construct
  source 1..41: mol_type = other RNA
gctatctgagcagaactcatggtggcggccgcgcctcacaa

SEQ ID NO: 6574 - RNA, 41 nt, synthetic construct
  source 1..41: mol_type = other RNA
gctatctgagccacgctccgggtgggggcagcgcctcacaa

SEQ ID NO: 6575 - RNA, 42 nt, synthetic construct
  source 1..42: mol_type = other RNA
tgagcagcgcacatggtgggggcagcgcctctacaacctccg

SEQ ID NO: 6576 - RNA, 41 nt, synthetic construct
  source 1..41: mol_type = other RNA
gcgctcattgtgggggaagcaccccataaccttcgtcatgt

SEQ ID NO: 6577 - RNA, 41 nt, synthetic construct
  source 1..41: mol_type = other RNA
gctatctgagcagtgctcatggtgggggcggcgcctcacaa

SEQ ID NO: 6578 - RNA, 34 nt, synthetic construct
  source 1..34: mol_type = other RNA
cgctcatggtggggacaacaacgcctcacaacct

SEQ ID NO: 6579 - RNA, 41 nt, synthetic construct
  source 1..41: mol_type = other RNA
gcgctcatggtgggggcagcgcctcacaactcacgtcatgt

SEQ ID NO: 6580 - RNA, 41 nt, synthetic construct
  source 1..41: mol_type = other RNA
gctatctgagctgcgttcatggtgggggccgcgcctcacaa

SEQ ID NO: 6581 - RNA, 41 nt, synthetic construct
  source 1..41: mol_type = other RNA
tgagcagcgctcatggtgggggcagcaccttacaacctccg

SEQ ID NO: 6582 - RNA, 42 nt, synthetic construct
  source 1..42: mol_type = other RNA
gctatctggggcagcgctcatggtgggggcggcgcctcacaa

SEQ ID NO: 6583 - RNA, 41 nt, synthetic construct
  source 1..41: mol_type = other RNA
tgggggcagcacctcacaacctccctcatgtgctgtgactg

SEQ ID NO: 6584 - RNA, 41 nt, synthetic construct
  source 1..41: mol_type = other RNA
gctatctgaacagcgctcattgtgggggaagcacctcacaa

SEQ ID NO: 6585 - RNA, 41 nt, synthetic construct
  source 1..41: mol_type = other RNA
tgagcagcgctcatggtgggggccgcgcctcacaacctccg

SEQ ID NO: 6586 - RNA, 41 nt, synthetic construct
  source 1..41: mol_type = other RNA
gctatctgagcggcgctcatggtgggggcagcgcctcacaa

SEQ ID NO: 6587 - RNA, 41 nt, synthetic construct
  source 1..41: mol_type = other RNA
gcgctcatagtgggggaagcaccccacaaacttcgtcatgt

SEQ ID NO: 6588 - RNA, 41 nt, synthetic construct
  source 1..41: mol_type = other RNA
gctatctgagaagcgctcatggtgggggcggcgcctcacaa

SEQ ID NO: 6589 - RNA, 41 nt, synthetic construct
  source 1..41: mol_type = other RNA
tgagcagcgctcatggtggaggcagcgcctcacaacctccg

SEQ ID NO: 6590 - RNA, 41 nt, synthetic construct
  source 1..41: mol_type = other RNA
tgagcagcgctcatggtggtggcagcgcctcacaacctccg

SEQ ID NO: 6591 - RNA, 41 nt, synthetic construct
  source 1..41: mol_type = other RNA
tgggggcagcacctcccatcctccatcatgtgctgtgactg

SEQ ID NO: 6592 - RNA, 41 nt, synthetic construct
  source 1..41: mol_type = other RNA
gctatctgagcagcgctcatggtgagggcagcacctcacaa

SEQ ID NO: 6593 - RNA, 41 nt, synthetic construct
  source 1..41: mol_type = other RNA
gctatctgagtagcgctcatggtgggggcagcgcctcacaa

SEQ ID NO: 6594 - RNA, 41 nt, synthetic construct
  source 1..41: mol_type = other RNA
gctatctgagcagagctcctggtgggggcagcacctcacaa

SEQ ID NO: 6595 - RNA, 41 nt, synthetic construct
  source 1..41: mol_type = other RNA
gcgctcatgatgggggccgcgcctcaccgtctccgtcatgt

SEQ ID NO: 6596 - RNA, 41 nt, synthetic construct
  source 1..41: mol_type = other RNA
tgagcagcgctcatggtgggggcagcgcctcacaacctccg

SEQ ID NO: 6597 - RNA, 31 nt, synthetic construct
  source 1..31: mol_type = other RNA
gagcagcgctcatgatgggggcagcgcctca

SEQ ID NO: 6598 - RNA, 42 nt, synthetic construct
  source 1..42: mol_type = other RNA
gctatctgagcagacgctcatggtgggggcagcacctcacaa

SEQ ID NO: 6599 - RNA, 31 nt, synthetic construct
  source 1..31: mol_type = other RNA
cgctcatggtgggggcagcgcctcccaacct

SEQ ID NO: 6600 - RNA, 41 nt, synthetic construct
  source 1..41: mol_type = other RNA
tgagcagcgctcatggtgggggcggcgcctcataacctccg

SEQ ID NO: 6601 - RNA, 41 nt, synthetic construct
  source 1..41: mol_type = other RNA
tgagcagcgctcatgatgggggcagcgcctcacaacctccg

SEQ ID NO: 6602 - RNA, 41 nt, synthetic construct
  source 1..41: mol_type = other RNA
gcgctcatggtggacgcagcacctcccaccctccgtcatgt

SEQ ID NO: 6603 - RNA, 41 nt, synthetic construct
  source 1..41: mol_type = other RNA
tgagcagcgttcatggtgggggccgcgcctcacaacctccg

SEQ ID NO: 6604 - RNA, 41 nt, synthetic construct
  source 1..41: mol_type = other RNA
gctatctgagcagcgctcatggtgggggcagcacctcacaa

SEQ ID NO: 6605 - RNA, 41 nt, synthetic construct
  source 1..41: mol_type = other RNA
tgagcagcgctcgtggtgggggcagcgccttacaacctccg

SEQ ID NO: 6606 - RNA, 41 nt, synthetic construct
  source 1..41: mol_type = other RNA
tgagcagcgttcatggcaaaggctgcgcctcagaacctccg

SEQ ID NO: 6607 - RNA, 41 nt, synthetic construct
  source 1..41: mol_type = other RNA
gctatctgagcacggttcatggtgggggcagcgcctcacaa

SEQ ID NO: 6608 - RNA, 44 nt, synthetic construct
  source 1..44: mol_type = other RNA
tgagcagcgctcatggtgggggcggcgcctcatcacaacctccg

SEQ ID NO: 6609 - RNA, 41 nt, synthetic construct
  source 1..41: mol_type = other RNA
gcgctcatggtgggggcagcgcctaccaagctccgtcatgt

SEQ ID NO: 6610 - RNA, 41 nt, synthetic construct
  source 1..41: mol_type = other RNA
tgagcagcgctcatggtgggggcagcgccgtacaacctccg

SEQ ID NO: 6611 - RNA, 41 nt, synthetic construct
  source 1..41: mol_type = other RNA
gctatctgagccacgctcctggtgggggcagcacctcacaa

SEQ ID NO: 6612 - RNA, 41 nt, synthetic construct
  source 1..41: mol_type = other RNA
gctatctgagcggcgctcatggtgggtagagcgcctcacaa

SEQ ID NO: 6613 - RNA, 41 nt, synthetic construct
  source 1..41: mol_type = other RNA
tgggggcagcacctcccattcgccgccatgtgctgtgactg

SEQ ID NO: 6614 - RNA, 31 nt, synthetic construct
  source 1..31: mol_type = other RNA
gagcagcgctcatgctggcggcagcgcctca

SEQ ID NO: 6615 - RNA, 41 nt, synthetic construct
  source 1..41: mol_type = other RNA
gcgctcatggtgggggccgcgcctcacaaactccgtcatgt

SEQ ID NO: 6616 - RNA, 41 nt, synthetic construct
  source 1..41: mol_type = other RNA
tgagcagcgctcatggtgggggcagcgccacgcaacctccg

SEQ ID NO: 6617 - RNA, 41 nt, synthetic construct
  source 1..41: mol_type = other RNA
tgagcagcgctcatggtgagggcagcgcctaccaacctccg

SEQ ID NO: 6618 - RNA, 41 nt, synthetic construct
  source 1..41: mol_type = other RNA
tgagcagcgctcatggtgggggcagcgcctcccaacctccg

SEQ ID NO: 6619 - RNA, 41 nt, synthetic construct
  source 1..41: mol_type = other RNA
gcgctcatggtgggcgcagcgcctcaaagtccccgtcatgt

SEQ ID NO: 6620 - RNA, 40 nt, synthetic construct
  source 1..40: mol_type = other RNA
gctatctggcagcgctcatggtgggggcggcgcctcacaa

SEQ ID NO: 6621 - RNA, 31 nt, synthetic construct
  source 1..31: mol_type = other RNA
gagcagcgctcatggagggggcagcgcctca

SEQ ID NO: 6622 - RNA, 33 nt, synthetic construct
  source 1..33: mol_type = other RNA
gggcagcgcttccacgacctccgtgaatgtgct

SEQ ID NO: 6623 - RNA, 41 nt, synthetic construct
  source 1..41: mol_type = other RNA
gcgctcatggtgggggcagcgcgtcacaacttccgtcatgt

SEQ ID NO: 6624 - RNA, 41 nt, synthetic construct
  source 1..41: mol_type = other RNA
tgagcagcgctcatggtgggggcggcgccccacaacctccg

SEQ ID NO: 6625 - RNA, 41 nt, synthetic construct
  source 1..41: mol_type = other RNA
gcgctcatggtggcggccgcgcatcacagtcaccgtcatgt

SEQ ID NO: 6626 - RNA, 42 nt, synthetic construct
  source 1..42: mol_type = other RNA
tgagcagcgctcatgggtgggggcagcgcctcccaacctccg

SEQ ID NO: 6627 - RNA, 41 nt, synthetic construct
  source 1..41: mol_type = other RNA
gctatctgggcagcgttcatggtggggggagcgcctcacaa

SEQ ID NO: 6628 - RNA, 41 nt, synthetic construct
  source 1..41: mol_type = other RNA
tgagcagcgctcatgctggcggcagcgcctctcaacctccg

SEQ ID NO: 6629 - RNA, 31 nt, synthetic construct
  source 1..31: mol_type = other RNA
gagcagcgctcatgttgggggcagcgcctca

SEQ ID NO: 6630 - RNA, 41 nt, synthetic construct
  source 1..41: mol_type = other RNA
gcgctcatggtgggggcagcgcctcacaaactccgtcatgt

SEQ ID NO: 6631 - RNA, 31 nt, synthetic construct
  source 1..31: mol_type = other RNA
gagcagcgctcatggtgagggcagcgcctca

SEQ ID NO: 6632 - RNA, 41 nt, synthetic construct
  source 1..41: mol_type = other RNA
gcgctcatggtgggggcagcgccttacaacctgcgtcatgt

SEQ ID NO: 6633 - RNA, 40 nt, synthetic construct
  source 1..40: mol_type = other RNA
gctatctgagcaccgttcatgtgggggcagcacctcacaa

SEQ ID NO: 6634 - RNA, 41 nt, synthetic construct
  source 1..41: mol_type = other RNA
tgagcagcgctcatggtgggggcagcacctcacaacctccg

SEQ ID NO: 6635 - RNA, 42 nt, synthetic construct
  source 1..42: mol_type = other RNA
gctatctgagcagcgctcctggtggggagcagcacctcacaa

SEQ ID NO: 6636 - RNA, 41 nt, synthetic construct
  source 1..41: mol_type = other RNA
tgggggcagcacctcccaacctccgccatgtgctgtgactg

SEQ ID NO: 6637 - RNA, 41 nt, synthetic construct
  source 1..41: mol_type = other RNA
gcgctcatggtgggggcagcgcctcgcaaccaccgtcatgt

SEQ ID NO: 6638 - RNA, 41 nt, synthetic construct
  source 1..41: mol_type = other RNA
tgggggcagcacctcacaacctccgtcctgcgctgtgactg

SEQ ID NO: 6639 - RNA, 41 nt, synthetic construct
  source 1..41: mol_type = other RNA
gctatctgcgcagcgctcatgttgggggcagcgcctcacaa

SEQ ID NO: 6640 - RNA, 31 nt, synthetic construct
  source 1..31: mol_type = other RNA
gagcaacgctcatggtggtggcagcgcctca

SEQ ID NO: 6641 - RNA, 41 nt, synthetic construct
  source 1..41: mol_type = other RNA
gcgctcatggtgggggcagcgcctcacacactgcgtcatgt

SEQ ID NO: 6642 - RNA, 31 nt, synthetic construct
  source 1..31: mol_type = other RNA
gagcagcgctcctggtgggggcagcgcctca

SEQ ID NO: 6643 - RNA, 41 nt, synthetic construct
  source 1..41: mol_type = other RNA
gctatctgaacagccatcatggtgggcgcagcgcctcacaa

SEQ ID NO: 6644 - RNA, 31 nt, synthetic construct
  source 1..31: mol_type = other RNA
gagcagcgctcatggcggaggccgcgcctca

SEQ ID NO: 6645 - RNA, 41 nt, synthetic construct
  source 1..41: mol_type = other RNA
gcgctcatggtgtgggcagcacctcccaactgccgtcatgt

SEQ ID NO: 6646 - RNA, 41 nt, synthetic construct
  source 1..41: mol_type = other RNA
gctatctgagtagctctactggtgggggcagcgcctcacaa

SEQ ID NO: 6647 - RNA, 41 nt, synthetic construct
  source 1..41: mol_type = other RNA
gcgctcatggtgggggccgcgcctcacaacctccgtcatgt

SEQ ID NO: 6648 - RNA, 41 nt, synthetic construct
  source 1..41: mol_type = other RNA
gcgctcatggtgggggcagcgcctcgcgggctccgtcatgt

SEQ ID NO: 6649 - RNA, 40 nt, synthetic construct
  source 1..40: mol_type = other RNA
tgagcagcgctcatggtgggggcggcgcctcaaacctccg

SEQ ID NO: 6650 - RNA, 31 nt, synthetic construct
  source 1..31: mol_type = other RNA
gagcagcgctcatggtgggggccgcgcctca

SEQ ID NO: 6651 - RNA, 41 nt, synthetic construct
  source 1..41: mol_type = other RNA
tgagcagcgcttatcgtgggggcagcgcattagaacctccg

SEQ ID NO: 6652 - RNA, 41 nt, synthetic construct
  source 1..41: mol_type = other RNA
gctatctgagcagcgttcatggtgggggcaacgcctcacaa

SEQ ID NO: 6653 - RNA, 41 nt, synthetic construct
  source 1..41: mol_type = other RNA
gcgctcatggtgggggcagcgcctaacaacctccgtcatgt

SEQ ID NO: 6654 - RNA, 31 nt, synthetic construct
  source 1..31: mol_type = other RNA
gagcagcgctcatggtgggggcagcgcctca

SEQ ID NO: 6655 - RNA, 41 nt, synthetic construct
  source 1..41: mol_type = other RNA
gcgctcatggtgggggcagcgcctcccgatcaccgtcatgt

SEQ ID NO: 6656 - RNA, 31 nt, synthetic construct
  source 1..31: mol_type = other RNA
gagcagcgctcatggttggggcagcacctca

SEQ ID NO: 6657 - RNA, 41 nt, synthetic construct
  source 1..41: mol_type = other RNA
gcgctcatggtgggggcagcacctcccattcgccgtcatgt

SEQ ID NO: 6658 - RNA, 41 nt, synthetic construct
  source 1..41: mol_type = other RNA
tgagcagcgctcatggtgtgggcagcacctcccaacctccg

SEQ ID NO: 6659 - RNA, 41 nt, synthetic construct
  source 1..41: mol_type = other RNA
gctatctgagtagagctcgtggtgggggcagcgcctcacaa

SEQ ID NO: 6660 - RNA, 41 nt, synthetic construct
  source 1..41: mol_type = other RNA
gcgctcatcgtgggggcagcgcattagaatctccgtcatgt

SEQ ID NO: 6661 - RNA, 41 nt, synthetic construct
  source 1..41: mol_type = other RNA
gcgctcatggtgggggcagcgccgtacaacctccgtcatgt

SEQ ID NO: 6662 - RNA, 41 nt, synthetic construct
  source 1..41: mol_type = other RNA
gcgctcatggtgggggcagcgcctcgccacctccgtcatgt

SEQ ID NO: 6663 - RNA, 47 nt, synthetic construct
  source 1..47: mol_type = other RNA
tgagcagcgcccatggttagggcagcgcctccttgtcacaacctccg

SEQ ID NO: 6664 - RNA, 41 nt, synthetic construct
  source 1..41: mol_type = other RNA
gctatctgagcagcgatcctggtggacgcagcacctcacaa

SEQ ID NO: 6665 - RNA, 41 nt, synthetic construct
  source 1..41: mol_type = other RNA
gcgctcatggtgggggccgcgcctcaccacctccgtcatgt

SEQ ID NO: 6666 - RNA, 42 nt, synthetic construct
  source 1..42: mol_type = other RNA
gcgctcatggtgggggcagcaccttacaattctccgtcatgt

SEQ ID NO: 6667 - RNA, 39 nt, synthetic construct
  source 1..39: mol_type = other RNA
gctatctgagcagtgcccatgcggggcagcacctcacaa

SEQ ID NO: 6668 - RNA, 40 nt, synthetic construct
  source 1..40: mol_type = other RNA
gcgctcatggtgggggcagcgccttacaaatccgtcatgt

SEQ ID NO: 6669 - RNA, 31 nt, synthetic construct
  source 1..31: mol_type = other RNA
gagcagcgttcatggtaggggcagcgcctca

SEQ ID NO: 6670 - RNA, 41 nt, synthetic construct
  source 1..41: mol_type = other RNA
gcgctcatggtggggggagcgcctcacaacctccgtcatgt

SEQ ID NO: 6671 - RNA, 31 nt, synthetic construct
  source 1..31: mol_type = other RNA
gagcagcgcgcatgatgggggcagcgcctca

SEQ ID NO: 6672 - RNA, 41 nt, synthetic construct
  source 1..41: mol_type = other RNA
tgagcagcactcatggtggcggccgcgcatcacaacctccg

SEQ ID NO: 6673 - RNA, 41 nt, synthetic construct
  source 1..41: mol_type = other RNA
gcgctcatgatgggggcagcaccttataacttccgtcatgt

SEQ ID NO: 6674 - RNA, 41 nt, synthetic construct
  source 1..41: mol_type = other RNA
tgggggcagcaccttataacttccgtcatgtgctgtgactg

SEQ ID NO: 6675 - RNA, 41 nt, synthetic construct
  source 1..41: mol_type = other RNA
gcgctcatggtgggggcagcgccacgcaatttccgtcatgt

SEQ ID NO: 6676 - RNA, 41 nt, synthetic construct
  source 1..41: mol_type = other RNA
gctatctgagcagcgctcatgatgggggcaacgcctcacaa

SEQ ID NO: 6677 - RNA, 41 nt, synthetic construct
  source 1..41: mol_type = other RNA
gcgctcatggtgggggcagcgcctcccggcctccgtcatgt

SEQ ID NO: 6678 - RNA, 43 nt, synthetic construct
  source 1..43: mol_type = other RNA
gcgctcatggtgggggcagcgcctctacaaccatccgtcatgt

SEQ ID NO: 6679 - RNA, 31 nt, synthetic construct
  source 1..31: mol_type = other RNA
cgctcatggcggaggccgcgccttagaacct

SEQ ID NO: 6680 - RNA, 41 nt, synthetic construct
  source 1..41: mol_type = other RNA
tgagcagcgctcatggtgggggcggcacctcacaacctccg

SEQ ID NO: 6681 - RNA, 41 nt, synthetic construct
  source 1..41: mol_type = other RNA
tgagcagctctaatgatgggggccgcgcctcacaacctccg

SEQ ID NO: 6682 - RNA, 41 nt, synthetic construct
  source 1..41: mol_type = other RNA
gcgctcatggtgggggcagcgcaccccaacctccgtcatgt

SEQ ID NO: 6683 - RNA, 42 nt, synthetic construct
  source 1..42: mol_type = other RNA
gcgctcatggtgggggcagcgccttacaaaactccgtcatgt

SEQ ID NO: 6684 - RNA, 41 nt, synthetic construct
  source 1..41: mol_type = other RNA
tgagcagcgctcgtggtgggggcagcgcctcacaacctccg

SEQ ID NO: 6685 - RNA, 40 nt, synthetic construct
  source 1..40: mol_type = other RNA
gcgctcatgtgggggcagcacctcgccccctccgtcatgt

SEQ ID NO: 6686 - RNA, 31 nt, synthetic construct
  source 1..31: mol_type = other RNA
gagcagcgctcgtggtgggggcagcgcctca

SEQ ID NO: 6687 - RNA, 41 nt, synthetic construct
  source 1..41: mol_type = other RNA
gcgctcatggtgggggcagcgcctctaaatcttcgtcatgt

SEQ ID NO: 6688 - RNA, 31 nt, synthetic construct
  source 1..31: mol_type = other RNA
cgctcatggtgggggcagcgcctaacaacct

SEQ ID NO: 6689 - RNA, 41 nt, synthetic construct
  source 1..41: mol_type = other RNA
tgagcagcgctcctggtgggggcggcgcctaccaacctccg

SEQ ID NO: 6690 - RNA, 31 nt, synthetic construct
  source 1..31: mol_type = other RNA
gagcagcgtccatggtgggggcagcgcctca

SEQ ID NO: 6691 - RNA, 41 nt, synthetic construct
  source 1..41: mol_type = other RNA
gcgctcatcgtgggggcagcgccttagactctccgtcatgt

SEQ ID NO: 6692 - RNA, 41 nt, synthetic construct
  source 1..41: mol_type = other RNA
gctatctgcgcagcgctcaaggtgggggcggcacctcacaa

SEQ ID NO: 6693 - RNA, 31 nt, synthetic construct
  source 1..31: mol_type = other RNA
gagcaacgctccgggtgggggcagcgcctca

SEQ ID NO: 6694 - RNA, 42 nt, synthetic construct
  source 1..42: mol_type = other RNA
atggtgggggcagcacctcacaaagctccaccatgtgctgtg

SEQ ID NO: 6695 - RNA, 41 nt, synthetic construct
  source 1..41: mol_type = other RNA
gcgctcatgttgggggcagcgcctcacaacctccgtcatgt

SEQ ID NO: 6696 - RNA, 41 nt, synthetic construct
  source 1..41: mol_type = other RNA
gcgctcatggtgggggcagcgcctcacgatttccgtcatgt

SEQ ID NO: 6697 - RNA, 31 nt, synthetic construct
  source 1..31: mol_type = other RNA
cgctcatgatgggggccgcgcctcacaacct

SEQ ID NO: 6698 - RNA, 41 nt, synthetic construct
  source 1..41: mol_type = other RNA
gcgctcatggtgggggcggcgcctcatcacctccgtcatgt

SEQ ID NO: 6699 - RNA, 41 nt, synthetic construct
  source 1..41: mol_type = other RNA
tgagcagcgctcatggtgagggcagcacctcacaacctccg

SEQ ID NO: 6700 - RNA, 41 nt, synthetic construct
  source 1..41: mol_type = other RNA
tgagcagcgctcgtagtgggggaagcaccccataacctccg

SEQ ID NO: 6701 - RNA, 41 nt, synthetic construct
  source 1..41: mol_type = other RNA
tgagcagcgctcgtggtgggggcagcaccttacaacctccg

SEQ ID NO: 6702 - RNA, 42 nt, synthetic construct
  source 1..42: mol_type = other RNA
gcgctcatggtgggggcagcacctcacaaaataccgtcatgt

SEQ ID NO: 6703 - RNA, 41 nt, synthetic construct
  source 1..41: mol_type = other RNA
tgagcagcgctcatggtgggggcagcgcctcgcaacctccg

SEQ ID NO: 6704 - RNA, 42 nt, synthetic construct
  source 1..42: mol_type = other RNA
gcgctcatggtgatgtgcagcgcctcacaaactccgtcatgt

SEQ ID NO: 6705 - RNA, 35 nt, synthetic construct
  source 1..35: mol_type = other RNA
atggtggggcagcgcctcacaacctctgtgctgtg

SEQ ID NO: 6706 - RNA, 41 nt, synthetic construct
  source 1..41: mol_type = other RNA
gcgctcatcttgggggcaacacctggcaacctccgtcatgt

SEQ ID NO: 6707 - RNA, 41 nt, synthetic construct
  source 1..41: mol_type = other RNA
tgagcagcgctcatggagggggcagcgcttccaaacctccg

SEQ ID NO: 6708 - RNA, 40 nt, synthetic construct
  source 1..40: mol_type = other RNA
gctatctgagcagcgctcctatgggggcagcacctcacaa

SEQ ID NO: 6709 - RNA, 41 nt, synthetic construct
  source 1..41: mol_type = other RNA
gctatctgagaatagctcatggtgggggcggcgcctcacaa

SEQ ID NO: 6710 - RNA, 31 nt, synthetic construct
  source 1..31: mol_type = other RNA
tggtgggggcggcgcctcaacacactcgtca

SEQ ID NO: 6711 - RNA, 41 nt, synthetic construct
  source 1..41: mol_type = other RNA
gctatctgaaccgtgcttatcgtgggggcagcgcctcacaa

SEQ ID NO: 6712 - RNA, 41 nt, synthetic construct
  source 1..41: mol_type = other RNA
atggtgggggcggcgcctcataacctccgtcatgtgctgtg

SEQ ID NO: 6713 - RNA, 41 nt, synthetic construct
  source 1..41: mol_type = other RNA
tgagcagcgttcatggtggggggagcgcctcacaacctccg

SEQ ID NO: 6714 - RNA, 41 nt, synthetic construct
  source 1..41: mol_type = other RNA
gcgctcatggtgggggcagcacctcaagatcttcgtcatgt

SEQ ID NO: 6715 - RNA, 31 nt, synthetic construct
  source 1..31: mol_type = other RNA
gagcagcgctcacggtgggggcggcgcctca

SEQ ID NO: 6716 - RNA, 42 nt, synthetic construct
  source 1..42: mol_type = other RNA
gcgctcatgggtgggggcagcgcctcccccactacgtcatgt

SEQ ID NO: 6717 - RNA, 41 nt, synthetic construct
  source 1..41: mol_type = other RNA
gcgctcatggtgggggcagcgctccacaacctccgtcatgt

SEQ ID NO: 6718 - RNA, 41 nt, synthetic construct
  source 1..41: mol_type = other RNA
atggtgggggcagcacctcaaaatccccgtcatgtgctgtg

SEQ ID NO: 6719 - RNA, 42 nt, synthetic construct
  source 1..42: mol_type = other RNA
gcgctcatggtggagagcagcgcatcaacacctccgtcatgt

SEQ ID NO: 6720 - RNA, 41 nt, synthetic construct
  source 1..41: mol_type = other RNA
tgagcagcgctcatgatgggggcagcaccttataacctccg

SEQ ID NO: 6721 - RNA, 41 nt, synthetic construct
  source 1..41: mol_type = other RNA
gcgctcatggtgggggcagcgcctcccaaccgccgtcatgt

SEQ ID NO: 6722 - RNA, 41 nt, synthetic construct
  source 1..41: mol_type = other RNA
tgagcagcgctcatggtgggggcagcgcgtcacaacctccg

SEQ ID NO: 6723 - RNA, 41 nt, synthetic construct
  source 1..41: mol_type = other RNA
tgagcagcgctcatggtgagggcagcgcatcacaacctccg

SEQ ID NO: 6724 - RNA, 41 nt, synthetic construct
  source 1..41: mol_type = other RNA
gctatctgagcagcgctcatggtgggggcatcacctcacaa

SEQ ID NO: 6725 - RNA, 41 nt, synthetic construct
  source 1..41: mol_type = other RNA
tgggggcagcacctcccaccctccgccctgtgctgtgactg

SEQ ID NO: 6726 - RNA, 31 nt, synthetic construct
  source 1..31: mol_type = other RNA
gagcagcgttcatggtgggggccgcgcctca

SEQ ID NO: 6727 - RNA, 43 nt, synthetic construct
  source 1..43: mol_type = other RNA
tgagcagcgctcatggtggagagcagcgcatcaacaacctccg

SEQ ID NO: 6728 - RNA, 31 nt, synthetic construct
  source 1..31: mol_type = other RNA
gagcagagctcatggtggaggcagcgcctca

SEQ ID NO: 6729 - RNA, 41 nt, synthetic construct
  source 1..41: mol_type = other RNA
gcgctcatagtgggcgaagcgccccacaatgtccgtcatgt

SEQ ID NO: 6730 - RNA, 31 nt, synthetic construct
  source 1..31: mol_type = other RNA
gagcagcgctcatggtgtgggcagcacctca

SEQ ID NO: 6731 - RNA, 31 nt, synthetic construct
  source 1..31: mol_type = other RNA
gagcagcgctactggcgggggcagcgcctca

SEQ ID NO: 6732 - RNA, 41 nt, synthetic construct
  source 1..41: mol_type = other RNA
gcgctcatggtggaggcagcgcctcacaacctccgtcatgt

SEQ ID NO: 6733 - RNA, 31 nt, synthetic construct
  source 1..31: mol_type = other RNA
gagcagcgctcatggtgagggcagcacctca

SEQ ID NO: 6734 - RNA, 41 nt, synthetic construct
  source 1..41: mol_type = other RNA
gcgctcatggtgggggcggcgcctaccaactttcgtcatgt

SEQ ID NO: 6735 - RNA, 40 nt, synthetic construct
  source 1..40: mol_type = other RNA
gctatctgagcaggctcctggtgggggcggcgcctcacaa

SEQ ID NO: 6736 - RNA, 41 nt, synthetic construct
  source 1..41: mol_type = other RNA
tgagcagcgctcatggtgggggcagcgactcacaacctccg

SEQ ID NO: 6737 - RNA, 41 nt, synthetic construct
  source 1..41: mol_type = other RNA
gctatctgaccagcgcgcatgatgggggcagcgcctcacaa

SEQ ID NO: 6738 - RNA, 31 nt, synthetic construct
  source 1..31: mol_type = other RNA
tcatgctggcggcagcgcctctcagcctccg

SEQ ID NO: 6739 - RNA, 31 nt, synthetic construct
  source 1..31: mol_type = other RNA
cgctcatggtgggggccgcgcctcacaacct

SEQ ID NO: 6740 - RNA, 41 nt, synthetic construct
  source 1..41: mol_type = other RNA
gcgctcatggtggtggcagcacctcacaccccacgtcatgt

SEQ ID NO: 6741 - RNA, 41 nt, synthetic construct
  source 1..41: mol_type = other RNA
tgagcagcgctgatggtgggcgcagcacctcccaacctccg

SEQ ID NO: 6742 - RNA, 42 nt, synthetic construct
  source 1..42: mol_type = other RNA
atggtgggggcagcaccttacaattctccctcatgtgctgtg

SEQ ID NO: 6743 - RNA, 32 nt, synthetic construct
  source 1..32: mol_type = other RNA
tggtgggaggcagcgcctcacaacctccgtca

SEQ ID NO: 6744 - RNA, 31 nt, synthetic construct
  source 1..31: mol_type = other RNA
cgctcacggtgggggcggcgcctcataacct

SEQ ID NO: 6745 - RNA, 41 nt, synthetic construct
  source 1..41: mol_type = other RNA
tgagcagcgctcatggtagggggagcgcctcacaacctccg

SEQ ID NO: 6746 - RNA, 41 nt, synthetic construct
  source 1..41: mol_type = other RNA
atggtgggggcagcgctccacaacctccgtcatgtgctgtg

SEQ ID NO: 6747 - RNA, 31 nt, synthetic construct
  source 1..31: mol_type = other RNA
tggtgtaggacaagcctcaaaacctccgtca

SEQ ID NO: 6748 - RNA, 41 nt, synthetic construct
  source 1..41: mol_type = other RNA
gcgctcatggtgggggcggcacctcacaacctccgtcatgt

SEQ ID NO: 6749 - RNA, 31 nt, synthetic construct
  source 1..31: mol_type = other RNA
cgctcatggcggcggctgcgcctctcaacct

SEQ ID NO: 6750 - RNA, 31 nt, synthetic construct
  source 1..31: mol_type = other RNA
cgctcatgctggcggcagcgcctctcaacct

SEQ ID NO: 6751 - RNA, 31 nt, synthetic construct
  source 1..31: mol_type = other RNA
gagcagcgctcgtggtgggggcagcacctca

SEQ ID NO: 6752 - RNA, 41 nt, synthetic construct
  source 1..41: mol_type = other RNA
gcgctcatggtgggggcagcgcctaccgcaatccgtcatgt

SEQ ID NO: 6753 - RNA, 41 nt, synthetic construct
  source 1..41: mol_type = other RNA
tgagcagcgctcatgttgggggcagcgcctcacaacctccg

SEQ ID NO: 6754 - RNA, 41 nt, synthetic construct
  source 1..41: mol_type = other RNA
tgagcagcgctcattgtgggggaagcaccccacaacctccg

SEQ ID NO: 6755 - RNA, 41 nt, synthetic construct
  source 1..41: mol_type = other RNA
tgggggcagcaccttacaacctccgtcatgtgctgtgactg

SEQ ID NO: 6756 - RNA, 41 nt, synthetic construct
  source 1..41: mol_type = other RNA
gctatctgagcagagcttatggtgggggcagcacctcacaa

SEQ ID NO: 6757 - RNA, 31 nt, synthetic construct
  source 1..31: mol_type = other RNA
gggcagcgcgtcacaacttccaacatgtgct

SEQ ID NO: 6758 - RNA, 41 nt, synthetic construct
  source 1..41: mol_type = other RNA
gcgctcatgctgggggcagcacctcacaacctccgtcatgt

SEQ ID NO: 6759 - RNA, 31 nt, synthetic construct
  source 1..31: mol_type = other RNA
gagcagcgctcatagtgggggaagcacctca

SEQ ID NO: 6760 - RNA, 32 nt, synthetic construct
  source 1..32: mol_type = other RNA
cgctcatggtgggggcagcgcctcaacaacct

SEQ ID NO: 6761 - RNA, 40 nt, synthetic construct
  source 1..40: mol_type = other RNA
gcgctcatggtagggtagcacctcaaggcctccgtcatgt

SEQ ID NO: 6762 - RNA, 31 nt, synthetic construct
  source 1..31: mol_type = other RNA
gagcagcgctactgctgggggccgcgcctca

SEQ ID NO: 6763 - RNA, 41 nt, synthetic construct
  source 1..41: mol_type = other RNA
tgagcagcgcttatggtgggggcagcgcctctaaacctccg

SEQ ID NO: 6764 - RNA, 41 nt, synthetic construct
  source 1..41: mol_type = other RNA
tgagcagcggtcatggtgggggcagcgcctaacaacctccg

SEQ ID NO: 6765 - RNA, 42 nt, synthetic construct
  source 1..42: mol_type = other RNA
gcgctcatggtagggggagcgcctcactaacctccgtcatgt

SEQ ID NO: 6766 - RNA, 41 nt, synthetic construct
  source 1..41: mol_type = other RNA
atggtgggggcagcacctcccattcgccgccatgtgctgtg

SEQ ID NO: 6767 - RNA, 41 nt, synthetic construct
  source 1..41: mol_type = other RNA
tgagcagcgctcctggtgggggcagcacctcccaacctccg

SEQ ID NO: 6768 - RNA, 41 nt, synthetic construct
  source 1..41: mol_type = other RNA
gcgctcatggtgggggcagcgcctcacaacctccgtcatgt

SEQ ID NO: 6769 - RNA, 41 nt, synthetic construct
  source 1..41: mol_type = other RNA
gcgctcatggtgggggcagcgcctcaccacctccgtcatgt

SEQ ID NO: 6770 - RNA, 41 nt, synthetic construct
  source 1..41: mol_type = other RNA
gcgctcatggtgggggcagcgcatcacaccctccgtcatgt

SEQ ID NO: 6771 - RNA, 31 nt, synthetic construct
  source 1..31: mol_type = other RNA
gagcagcgcccatggttagggcagcgcctca

SEQ ID NO: 6772 - RNA, 41 nt, synthetic construct
  source 1..41: mol_type = other RNA
gcgctcatggtgggggcagcgcctcaacactcccgtcatgt

SEQ ID NO: 6773 - RNA, 41 nt, synthetic construct
  source 1..41: mol_type = other RNA
gctatctgagtagcgcgaatggtgggggccgcgcctcacaa

SEQ ID NO: 6774 - RNA, 40 nt, synthetic construct
  source 1..40: mol_type = other RNA
atggtggggtagcacctcaaggcctccgtcatgtgctgtg

SEQ ID NO: 6775 - RNA, 41 nt, synthetic construct
  source 1..41: mol_type = other RNA
tgagcagcgctactggcgggggcagcgccccacaacctccg

SEQ ID NO: 6776 - RNA, 41 nt, synthetic construct
  source 1..41: mol_type = other RNA
tgggggcagcacctcacgacctccgtcatgcgctgtgactg

SEQ ID NO: 6777 - RNA, 41 nt, synthetic construct
  source 1..41: mol_type = other RNA
atggtgggggcagcacctcgccccctccgtcatgtgctgtg

SEQ ID NO: 6778 - RNA, 31 nt, synthetic construct
  source 1..31: mol_type = other RNA
cgctcatggtgggggcaacgcctcacaacct

SEQ ID NO: 6779 - RNA, 31 nt, synthetic construct
  source 1..31: mol_type = other RNA
gagcagcgctcatgctgggggcagcacctca

SEQ ID NO: 6780 - RNA, 31 nt, synthetic construct
  source 1..31: mol_type = other RNA
gagcagcgctcatggtagggggagcgcctca

SEQ ID NO: 6781 - RNA, 31 nt, synthetic construct
  source 1..31: mol_type = other RNA
cgctcatggtgggggcagcgccgtacaacct

SEQ ID NO: 6782 - RNA, 31 nt, synthetic construct
  source 1..31: mol_type = other RNA
gagcagcgctcatgatgggggcagcacctca

SEQ ID NO: 6783 - RNA, 41 nt, synthetic construct
  source 1..41: mol_type = other RNA
gcgctcatggtgggggcatcgcctcacaacctacgtcatgt

SEQ ID NO: 6784 - RNA, 41 nt, synthetic construct
  source 1..41: mol_type = other RNA
gctatctgagcagcgctcatggtgggggcaacgcctcacaa

SEQ ID NO: 6785 - RNA, 31 nt, synthetic construct
  source 1..31: mol_type = other RNA
gagcagcgctcatggtgggggcaacgcctca

SEQ ID NO: 6786 - RNA, 41 nt, synthetic construct
  source 1..41: mol_type = other RNA
atggtgggggcagcacctcaagatcttcgtcatgtgctgtg

SEQ ID NO: 6787 - RNA, 32 nt, synthetic construct
  source 1..32: mol_type = other RNA
gagcaacgctcatgggtgggggcagcgcctca

SEQ ID NO: 6788 - RNA, 41 nt, synthetic construct
  source 1..41: mol_type = other RNA
atggtgggggcagcgccgtacaacctccgtcatgtgctgtg

SEQ ID NO: 6789 - RNA, 41 nt, synthetic construct
  source 1..41: mol_type = other RNA
gcgctcatggtgggggcggcgcctcacaccctccgtcatgt

SEQ ID NO: 6790 - RNA, 41 nt, synthetic construct
  source 1..41: mol_type = other RNA
gctatctgagcggagctgctggaaggggcagcacctcacaa

SEQ ID NO: 6791 - RNA, 31 nt, synthetic construct
  source 1..31: mol_type = other RNA
cgctcatggtgggggcagcgccttacaacct

SEQ ID NO: 6792 - RNA, 41 nt, synthetic construct
  source 1..41: mol_type = other RNA
tgggggcagcacctcacaacctccctcatgcgctgtgactg

SEQ ID NO: 6793 - RNA, 41 nt, synthetic construct
  source 1..41: mol_type = other RNA
gcgctcatgggaggggcagcgcatcacagtctacgtcatgt

SEQ ID NO: 6794 - RNA, 41 nt, synthetic construct
  source 1..41: mol_type = other RNA
atggtgggggcagcacctcacaacctccgtcctgtgctgtg

SEQ ID NO: 6795 - RNA, 40 nt, synthetic construct
  source 1..40: mol_type = other RNA
atggtggggcagcacctcacaacctccctcatgtgctgtg

SEQ ID NO: 6796 - RNA, 41 nt, synthetic construct
  source 1..41: mol_type = other RNA
gcgctcatggtgggggcggcgcctcataacctccgtcatgt

SEQ ID NO: 6797 - RNA, 31 nt, synthetic construct
  source 1..31: mol_type = other RNA
tggtgggggccgcgcctcacaacctccgtca

SEQ ID NO: 6798 - RNA, 41 nt, synthetic construct
  source 1..41: mol_type = other RNA
atggtgggggcagcacctcacaccccacgtcatgtgctgtg

SEQ ID NO: 6799 - RNA, 41 nt, synthetic construct
  source 1..41: mol_type = other RNA
tgagcagcgctcatgctgggggcagcacctcacaacctccg

SEQ ID NO: 6800 - RNA, 39 nt, synthetic construct
  source 1..39: mol_type = other RNA
gcgctcatgcggggcagcacctcacaacctccgtcatgt

SEQ ID NO: 6801 - RNA, 41 nt, synthetic construct
  source 1..41: mol_type = other RNA
tgagcagcgctcgtagtgggcgaagcgccccacaacctccg

SEQ ID NO: 6802 - RNA, 45 nt, synthetic construct
  source 1..45: mol_type = other RNA
gcgctcatggttggggcagcacctctctaacaacctccgtcatgt

SEQ ID NO: 6803 - RNA, 41 nt, synthetic construct
  source 1..41: mol_type = other RNA
tgagcagcgctcatggtgggggcaacgcctcaaaacctccg

SEQ ID NO: 6804 - RNA, 41 nt, synthetic construct
  source 1..41: mol_type = other RNA
tgggggcaacgcctcacaacctgcgtcatgtgctgtgactg

SEQ ID NO: 6805 - RNA, 31 nt, synthetic construct
  source 1..31: mol_type = other RNA
gagcagcggtcatggtgggggcagcgcctca

SEQ ID NO: 6806 - RNA, 31 nt, synthetic construct
  source 1..31: mol_type = other RNA
gagcagcgctcctggtgggggtagcgcctca

SEQ ID NO: 6807 - RNA, 31 nt, synthetic construct
  source 1..31: mol_type = other RNA
gagcagcgcacatggtgggggcagcgcctca

SEQ ID NO: 6808 - RNA, 37 nt, synthetic construct
  source 1..37: mol_type = other RNA
cgctcatggttagggcagcgcctccttgtcacaacct

SEQ ID NO: 6809 - RNA, 31 nt, synthetic construct
  source 1..31: mol_type = other RNA
gagcagcgctcgttgtgggcgaagcgcctca

SEQ ID NO: 6810 - RNA, 41 nt, synthetic construct
  source 1..41: mol_type = other RNA
gctatctgagcgacgccaatggtggtggcagcacctcacaa

SEQ ID NO: 6811 - RNA, 41 nt, synthetic construct
  source 1..41: mol_type = other RNA
gctatctgaaccgtgcttaccgtgggggcagcgcctcacaa

SEQ ID NO: 6812 - RNA, 31 nt, synthetic construct
  source 1..31: mol_type = other RNA
gagcagcggtcatggggggggcagcgcctca

SEQ ID NO: 6813 - RNA, 41 nt, synthetic construct
  source 1..41: mol_type = other RNA
atggtgggggcagcaccttataacttccgtcatgtgctgtg

SEQ ID NO: 6814 - RNA, 42 nt, synthetic construct
  source 1..42: mol_type = other RNA
tgagcagcgttcatggtgatgtgcagcgcctcacaacctccg

SEQ ID NO: 6815 - RNA, 32 nt, synthetic construct
  source 1..32: mol_type = other RNA
gagcagcgctcctggtggggagcagcacctca

SEQ ID NO: 6816 - RNA, 41 nt, synthetic construct
  source 1..41: mol_type = other RNA
atggtgggggccgcgcctcaccacctccgtcatgtgctgtg

SEQ ID NO: 6817 - RNA, 32 nt, synthetic construct
  source 1..32: mol_type = other RNA
gagcagagctcatggtggagagcagcgcctca

SEQ ID NO: 6818 - RNA, 41 nt, synthetic construct
  source 1..41: mol_type = other RNA
tgagcagcgcttatggtgggggcagcacctcaaaacctccg

SEQ ID NO: 6819 - RNA, 41 nt, synthetic construct
  source 1..41: mol_type = other RNA
gcgctcatggtgagggcagcacctcacaacctccgtcatgt

SEQ ID NO: 6820 - RNA, 31 nt, synthetic construct
  source 1..31: mol_type = other RNA
gagcagcgctcgtggtgggagcagcacctca

SEQ ID NO: 6821 - RNA, 32 nt, synthetic construct
  source 1..32: mol_type = other RNA
cgctcatggtgggggcagcgcctctacaacct

SEQ ID NO: 6822 - RNA, 47 nt, synthetic construct
  source 1..47: mol_type = other RNA
gcgctcatggttagggcagcgcctccttgtcacaaccgccgtcatgt

SEQ ID NO: 6823 - RNA, 41 nt, synthetic construct
  source 1..41: mol_type = other RNA
gctatctgagcagcgctcatggtggcggcagcccctcacaa

SEQ ID NO: 6824 - RNA, 31 nt, synthetic construct
  source 1..31: mol_type = other RNA
cgctcatggtgggggcagcgccacgcaacct

SEQ ID NO: 6825 - RNA, 31 nt, synthetic construct
  source 1..31: mol_type = other RNA
gagcagtgctcatggtgagggcagcgcctca

SEQ ID NO: 6826 - RNA, 31 nt, synthetic construct
  source 1..31: mol_type = other RNA
cgctcatggtgggggcagcgcgtcacaacct

SEQ ID NO: 6827 - RNA, 40 nt, synthetic construct
  source 1..40: mol_type = other RNA
tgggggcagcgccacacaacctccgtcagtgctgtgactg

SEQ ID NO: 6828 - RNA, 41 nt, synthetic construct
  source 1..41: mol_type = other RNA
gcgctcatggtgggtagagcgccgcgcaaactccgtcatgt

SEQ ID NO: 6829 - RNA, 31 nt, synthetic construct
  source 1..31: mol_type = other RNA
gagcagcgctcatggtgggtagagcgcctca

SEQ ID NO: 6830 - RNA, 41 nt, synthetic construct
  source 1..41: mol_type = other RNA
atggtgggggcagcgactcacacccccacccatgtgctgtg

SEQ ID NO: 6831 - RNA, 32 nt, synthetic construct
  source 1..32: mol_type = other RNA
gagcagcgttcatggtgttgtgcagcgcctca

SEQ ID NO: 6832 - RNA, 41 nt, synthetic construct
  source 1..41: mol_type = other RNA
tgagcagcgcgcatgatgggggcagcgcatcacaacctccg

SEQ ID NO: 6833 - RNA, 41 nt, synthetic construct
  source 1..41: mol_type = other RNA
atggtgggggccgcgcctcacaacctctgtcatgtgctgtg

SEQ ID NO: 6834 - RNA, 31 nt, synthetic construct
  source 1..31: mol_type = other RNA
gagcagcgctcatggtgggggcggcacctca

SEQ ID NO: 6835 - RNA, 45 nt, synthetic construct
  source 1..45: mol_type = other RNA
atggtgggggcagcacctctctaacaacctccgtcatgtgctgtg

SEQ ID NO: 6836 - RNA, 31 nt, synthetic construct
  source 1..31: mol_type = other RNA
cgctcatgatgggggcagcaccttataacct

SEQ ID NO: 6837 - RNA, 40 nt, synthetic construct
  source 1..40: mol_type = other RNA
tgggggcatcgcctcacaacctacgtcatgtgtgtgactg

SEQ ID NO: 6838 - RNA, 31 nt, synthetic construct
  source 1..31: mol_type = other RNA
cgctcgtggtgggggcagcgcctcacaacct

SEQ ID NO: 6839 - RNA, 31 nt, synthetic construct
  source 1..31: mol_type = other RNA
gggcagcacctcaagatcttcgtcatgtgct

SEQ ID NO: 6840 - RNA, 31 nt, synthetic construct
  source 1..31: mol_type = other RNA
tcatggtgggggaagcaccccataacctccg

SEQ ID NO: 6841 - RNA, 42 nt, synthetic construct
  source 1..42: mol_type = other RNA
gcgctcatggtgggggcagcacctcacaaagctccgtcatgt

SEQ ID NO: 6842 - RNA, 41 nt, synthetic construct
  source 1..41: mol_type = other RNA
gctatctgagcggagctgatggtgggcgcagcacctcacaa

SEQ ID NO: 6843 - RNA, 31 nt, synthetic construct
  source 1..31: mol_type = other RNA
gagcagcgctcatggtgggggcagcacctca

SEQ ID NO: 6844 - RNA, 31 nt, synthetic construct
  source 1..31: mol_type = other RNA
gagcagcgaccaaggtggggacagcgcctca

SEQ ID NO: 6845 - RNA, 41 nt, synthetic construct
  source 1..41: mol_type = other RNA
tgagcagcgctcatggtgggtagagcgccgcgcaacctccg

SEQ ID NO: 6846 - RNA, 30 nt, synthetic construct
  source 1..30: mol_type = other RNA
gagcagcgctcatggtgaggcagcgcctca

SEQ ID NO: 6847 - RNA, 41 nt, synthetic construct
  source 1..41: mol_type = other RNA
atggtgggcgcagcacctcccaccctccgccctgtgctgtg

SEQ ID NO: 6848 - RNA, 31 nt, synthetic construct
  source 1..31: mol_type = other RNA
gagcagcgttcctggtgagggtagcgcctca

SEQ ID NO: 6849 - RNA, 31 nt, synthetic construct
  source 1..31: mol_type = other RNA
cgctcatggtggtggcagcgcctcacaacct

SEQ ID NO: 6850 - RNA, 31 nt, synthetic construct
  source 1..31: mol_type = other RNA
gagcagcgctcgtagtgggggaagcacctca

SEQ ID NO: 6851 - RNA, 31 nt, synthetic construct
  source 1..31: mol_type = other RNA
cgctcatggtgggggcagcgcctcgcaacct

SEQ ID NO: 6852 - RNA, 31 nt, synthetic construct
  source 1..31: mol_type = other RNA
gagcagtgcttatcgtgggggcagcgcctca

SEQ ID NO: 6853 - RNA, 31 nt, synthetic construct
  source 1..31: mol_type = other RNA
gagcagcgctcctggtggggggagcgcctca

SEQ ID NO: 6854 - RNA, 41 nt, synthetic construct
  source 1..41: mol_type = other RNA
gcgctcatggcaaaggctgcgcctcagaacctccgtcatgt

SEQ ID NO: 6855 - RNA, 41 nt, synthetic construct
  source 1..41: mol_type = other RNA
tgggggcagcgcctcataacctctgtcaagtgctgtgactg

SEQ ID NO: 6856 - RNA, 39 nt, synthetic construct
  source 1..39: mol_type = other RNA
atggtgggggcagcgcctcacttcccgtcatgtgctgtg

SEQ ID NO: 6857 - RNA, 41 nt, synthetic construct
  source 1..41: mol_type = other RNA
gctatctgagcagcgctcatcttgggggcaacacctcacaa

SEQ ID NO: 6858 - RNA, 31 nt, synthetic construct
  source 1..31: mol_type = other RNA
gagcagcgctcaaggtgggggcggcacctca

SEQ ID NO: 6859 - RNA, 40 nt, synthetic construct
  source 1..40: mol_type = other RNA
gctatctgggcaccgctcatggtagggtagcacctcacaa

SEQ ID NO: 6860 - RNA, 45 nt, synthetic construct
  source 1..45: mol_type = other RNA
tgagcagcgctcatggttggggcagcacctctctaacaacctccg

SEQ ID NO: 6861 - RNA, 31 nt, synthetic construct
  source 1..31: mol_type = other RNA
cgctcctggtgggggcagcgcctcgcaacct

SEQ ID NO: 6862 - RNA, 31 nt, synthetic construct
  source 1..31: mol_type = other RNA
tcatggtgggggcagcgcctcccaacctccg

SEQ ID NO: 6863 - RNA, 41 nt, synthetic construct
  source 1..41: mol_type = other RNA
gcgctcatggtaggggcagcgcctcgccccctccgtcatgt

SEQ ID NO: 6864 - RNA, 34 nt, synthetic construct
  source 1..34: mol_type = other RNA
cgctcatggtgggggcggcgcctcatcacaacct

SEQ ID NO: 6865 - RNA, 31 nt, synthetic construct
  source 1..31: mol_type = other RNA
cgctcatgctgggggcagcacctcacaacct

SEQ ID NO: 6866 - RNA, 41 nt, synthetic construct
  source 1..41: mol_type = other RNA
tgagcagcgctcatgatgggggcaacgcctcacaacctccg

SEQ ID NO: 6867 - RNA, 31 nt, synthetic construct
  source 1..31: mol_type = other RNA
cgctcatggtgggggcagcgcctcacaacct

SEQ ID NO: 6868 - RNA, 31 nt, synthetic construct
  source 1..31: mol_type = other RNA
cgctcatagtgggggaagcaccccacaacct

SEQ ID NO: 6869 - RNA, 41 nt, synthetic construct
  source 1..41: mol_type = other RNA
gcgctcatgatgggggcagcgcatcacggcttccgtcatgt

SEQ ID NO: 6870 - RNA, 40 nt, synthetic construct
  source 1..40: mol_type = other RNA
tgagcagcgctcatggtgaggcagcgcctcacaacctccg

SEQ ID NO: 6871 - RNA, 31 nt, synthetic construct
  source 1..31: mol_type = other RNA
cgctcatggtgggggcggcgcctcataacct

SEQ ID NO: 6872 - RNA, 33 nt, synthetic construct
  source 1..33: mol_type = other RNA
cgctcatggtggagagcagcgcatcaacaacct

SEQ ID NO: 6873 - RNA, 31 nt, synthetic construct
  source 1..31: mol_type = other RNA
cgctcatggtgggcgcagcgcctcaaaacct

SEQ ID NO: 6874 - RNA, 30 nt, synthetic construct
  source 1..30: mol_type = other RNA
gagcagcgctcctatgggggcagcacctca

SEQ ID NO: 6875 - RNA, 41 nt, synthetic construct
  source 1..41: mol_type = other RNA
atggtgggggccgcgcctcaccgtctccgtcatgtgctgtg

SEQ ID NO: 6876 - RNA, 32 nt, synthetic construct
  source 1..32: mol_type = other RNA
tggtgggggcggcgcctcaccaaactccgtca

SEQ ID NO: 6877 - RNA, 31 nt, synthetic construct
  source 1..31: mol_type = other RNA
tcatggtgggggccgcgcctcacaaactccg

SEQ ID NO: 6878 - RNA, 41 nt, synthetic construct
  source 1..41: mol_type = other RNA
atggtgggggccgcgcctcacaaactccgtcatgtgctgtg

SEQ ID NO: 6879 - RNA, 31 nt, synthetic construct
  source 1..31: mol_type = other RNA
tggtgggggcagcgcctcgcaaccaccgtca

SEQ ID NO: 6880 - RNA, 41 nt, synthetic construct
  source 1..41: mol_type = other RNA
tgagcagcgttcatggtaggggcagcgcctcgcaacctccg

SEQ ID NO: 6881 - RNA, 41 nt, synthetic construct
  source 1..41: mol_type = other RNA
tgggggcagcgcctcacaacctccgtcatgtgctgtgactg

SEQ ID NO: 6882 - RNA, 31 nt, synthetic construct
  source 1..31: mol_type = other RNA
cgctcatggtgggggcagcgcctaccaacct

SEQ ID NO: 6883 - RNA, 44 nt, synthetic construct
  source 1..44: mol_type = other RNA
tgagcagcgctcatggtggggacaacaacgcctcacaacctccg

SEQ ID NO: 6884 - RNA, 41 nt, synthetic construct
  source 1..41: mol_type = other RNA
tgagcagctttcatgggaggggcagcgcatcacaacctccg

SEQ ID NO: 6885 - RNA, 42 nt, synthetic construct
  source 1..42: mol_type = other RNA
atggtgggagcagcacctcccaagctccgttaatgtgctgtg

SEQ ID NO: 6886 - RNA, 41 nt, synthetic construct
  source 1..41: mol_type = other RNA
tgggggcagcgcctcacaacctccgtcatgtaatgtgactg

SEQ ID NO: 6887 - RNA, 39 nt, synthetic construct
  source 1..39: mol_type = other RNA
gcgctcatggtgggggcagcgactcacaccccgtcatgt

SEQ ID NO: 6888 - RNA, 50 nt, synthetic construct
  source 1..50: mol_type = other RNA
atggtgggggcagcgcctcaccacctccgaaaaaaaaatcatgtgctgtg

SEQ ID NO: 6889 - RNA, 41 nt, synthetic construct
  source 1..41: mol_type = other RNA
tgagcagcgctcatcttgggggcaacacctggcaacctccg

SEQ ID NO: 6890 - RNA, 41 nt, synthetic construct
  source 1..41: mol_type = other RNA
gcgctcatggcgggggcagcgccccacgacttccgtcatgt

SEQ ID NO: 6891 - RNA, 41 nt, synthetic construct
  source 1..41: mol_type = other RNA
tgagcagcgccaatggtggtggcagcacctcacaacctccg

SEQ ID NO: 6892 - RNA, 41 nt, synthetic construct
  source 1..41: mol_type = other RNA
gcgctcatgatgggggcagcgcctcaccaccgccgtcatgt

SEQ ID NO: 6893 - RNA, 41 nt, synthetic construct
  source 1..41: mol_type = other RNA
atggtgggggcagcgcctcaccaccgccttcatgtgctgtg

SEQ ID NO: 6894 - RNA, 31 nt, synthetic construct
  source 1..31: mol_type = other RNA
tcatggtgggggcagcgccttacaacctccg

SEQ ID NO: 6895 - RNA, 41 nt, synthetic construct
  source 1..41: mol_type = other RNA
tgagcagcgttcatggtgggggcaacgcctcacaacctccg

SEQ ID NO: 6896 - RNA, 41 nt, synthetic construct
  source 1..41: mol_type = other RNA
atggtgggggcagcgcctaccaacctacgtcatgtgctgtg

SEQ ID NO: 6897 - RNA, 31 nt, synthetic construct
  source 1..31: mol_type = other RNA
gagcagcgttcatggtggggggagcgcctca

SEQ ID NO: 6898 - RNA, 31 nt, synthetic construct
  source 1..31: mol_type = other RNA
tcatggtgggggcagcgcctcacaacctccg

SEQ ID NO: 6899 - RNA, 31 nt, synthetic construct
  source 1..31: mol_type = other RNA
gagcaacgctcctggtgggggcagcacctca

SEQ ID NO: 6900 - RNA, 31 nt, synthetic construct
  source 1..31: mol_type = other RNA
tcatggtgggggcagcgcctcacaaactccg

SEQ ID NO: 6901 - RNA, 31 nt, synthetic construct
  source 1..31: mol_type = other RNA
gagcagcgctcatggtgggggcatcacctca

SEQ ID NO: 6902 - RNA, 41 nt, synthetic construct
  source 1..41: mol_type = other RNA
atggtgggggccgcgccttagaacctccgtcatgtgctgtg

SEQ ID NO: 6903 - RNA, 31 nt, synthetic construct
  source 1..31: mol_type = other RNA
gggcagcgcctcacaacctctgtcatgtgct

SEQ ID NO: 6904 - RNA, 35 nt, synthetic construct
  source 1..35: mol_type = other RNA
cgctcatggttggggcagcacctctctaacaacct

SEQ ID NO: 6905 - RNA, 41 nt, synthetic construct
  source 1..41: mol_type = other RNA
tgagcagcgcttaccgtgggggcagcgccttagaacctccg

SEQ ID NO: 6906 - RNA, 34 nt, synthetic construct
  source 1..34: mol_type = other RNA
tcatggggggggcagcgcctcacaccaacctccg

SEQ ID NO: 6907 - RNA, 64 nt, synthetic construct
  source 1..64: mol_type = other RNA
gctatctgagtcgcgttcatggtggtgcgagcaattatcctgccggcggatagccgcctcacaa

SEQ ID NO: 6908 - RNA, 31 nt, synthetic construct
  source 1..31: mol_type = other RNA
tggtgggtagagcgccgcgcaaactccgtca

SEQ ID NO: 6909 - RNA, 32 nt, synthetic construct
  source 1..32: mol_type = other RNA
gggcagcacctcccaagctccgttaatgtgct

SEQ ID NO: 6910 - RNA, 31 nt, synthetic construct
  source 1..31: mol_type = other RNA
tcatggcaaaggctgcgcctcagaacctccg

SEQ ID NO: 6911 - RNA, 31 nt, synthetic construct
  source 1..31: mol_type = other RNA
tcatgttgggggcagcgcctcacaacctccg

SEQ ID NO: 6912 - RNA, 32 nt, synthetic construct
  source 1..32: mol_type = other RNA
tcatggtgggggcagcgcctctacaacctccg

SEQ ID NO: 6913 - RNA, 31 nt, synthetic construct
  source 1..31: mol_type = other RNA
tggtgggggcagcgcctcacaacctccgtca

SEQ ID NO: 6914 - RNA, 32 nt, synthetic construct
  source 1..32: mol_type = other RNA
tcatggtgatgtgcagcgcctcacaaactccg

SEQ ID NO: 6915 - RNA, 30 nt, synthetic construct
  source 1..30: mol_type = other RNA
cgctcatggtgaggcagcgcctcacaacct

SEQ ID NO: 6916 - RNA, 30 nt, synthetic construct
  source 1..30: mol_type = other RNA
tcatggtagggtagcacctcaaggcctccg

SEQ ID NO: 6917 - RNA, 41 nt, synthetic construct
  source 1..41: mol_type = other RNA
atggtgggggcagcgccccacgacttccgtcatgtgctgtg

SEQ ID NO: 6918 - RNA, 43 nt, synthetic construct
  source 1..43: mol_type = other RNA
atggtgggggcagcgcttccacgacctccgtgaatgtgctgtg

SEQ ID NO: 6919 - RNA, 41 nt, synthetic construct
  source 1..41: mol_type = other RNA
tgagcagcgctcctggtgggggcagcgcctcgcaacctccg

SEQ ID NO: 6920 - RNA, 31 nt, synthetic construct
  source 1..31: mol_type = other RNA
cgctcatggtgggggcagcaccttacaacct

SEQ ID NO: 6921 - RNA, 31 nt, synthetic construct
  source 1..31: mol_type = other RNA
tcatggtgggggcagcgcctcgcaacctccg

SEQ ID NO: 6922 - RNA, 31 nt, synthetic construct
  source 1..31: mol_type = other RNA
cgctcatggtggaggcagcgcctcacaacct

SEQ ID NO: 6923 - RNA, 41 nt, synthetic construct
  source 1..41: mol_type = other RNA
tgagcagcgctccgggtgggggcagcgcctcacaacctccg

SEQ ID NO: 6924 - RNA, 31 nt, synthetic construct
  source 1..31: mol_type = other RNA
tggtgggggcagcgcctaccaagctccgtca

SEQ ID NO: 6925 - RNA, 41 nt, synthetic construct
  source 1..41: mol_type = other RNA
tgggggcagcgcaccacaacctccgtcatgtgctgtgactg

SEQ ID NO: 6926 - RNA, 41 nt, synthetic construct
  source 1..41: mol_type = other RNA
tgggggcagcgcctcacaacctccgtcacgtgctgtgactg

SEQ ID NO: 6927 - RNA, 31 nt, synthetic construct
  source 1..31: mol_type = other RNA
tggtgggggcagcgcctcaccacctccgtca

SEQ ID NO: 6928 - RNA, 41 nt, synthetic construct
  source 1..41: mol_type = other RNA
tgagcagcgttcatggtgggggcagcgcctcgcaacctccg

SEQ ID NO: 6929 - RNA, 41 nt, synthetic construct
  source 1..41: mol_type = other RNA
tgagcagcgctcatggtgggggcatcaccttacaacctccg

SEQ ID NO: 6930 - RNA, 41 nt, synthetic construct
  source 1..41: mol_type = other RNA
atggtgggggcagcgcctcaacactcccgtcatgtgctgtg

SEQ ID NO: 6931 - RNA, 41 nt, synthetic construct
  source 1..41: mol_type = other RNA
tgagcagcgctcaaggtgggggcggcacctcacaacctccg

SEQ ID NO: 6932 - RNA, 31 nt, synthetic construct
  source 1..31: mol_type = other RNA
cgctcatggtgggggcagcgcaccccaacct

SEQ ID NO: 6933 - RNA, 42 nt, synthetic construct
  source 1..42: mol_type = other RNA
tgagcagcgctcgatggcggcggctgcgcctctcaacctccg

SEQ ID NO: 6934 - RNA, 31 nt, synthetic construct
  source 1..31: mol_type = other RNA
tcatggtgggggcagcgcctcacgatctccg

SEQ ID NO: 6935 - RNA, 31 nt, synthetic construct
  source 1..31: mol_type = other RNA
cgctcatggagggggcagcgcttccaaacct

SEQ ID NO: 6936 - RNA, 31 nt, synthetic construct
  source 1..31: mol_type = other RNA
gggcagcaccttataacttccgtcatgtgct

SEQ ID NO: 6937 - RNA, 41 nt, synthetic construct
  source 1..41: mol_type = other RNA
tgagcagctaccatggtggggggcgcacctcacaacctccg

SEQ ID NO: 6938 - RNA, 31 nt, synthetic construct
  source 1..31: mol_type = other RNA
gagcagagctcgtggtgggggcagcgcctca

SEQ ID NO: 6939 - RNA, 41 nt, synthetic construct
  source 1..41: mol_type = other RNA
gcgctcatggtgggggcaacgcctcaagacctacgtcatgt

SEQ ID NO: 6940 - RNA, 43 nt, synthetic construct
  source 1..43: mol_type = other RNA
atggtgggggcaacgcctcacaacctgcgtcatgtgtgctgtg

SEQ ID NO: 6941 - RNA, 31 nt, synthetic construct
  source 1..31: mol_type = other RNA
cgctcatggtaggggcagcgcctcgcaacct

SEQ ID NO: 6942 - RNA, 41 nt, synthetic construct
  source 1..41: mol_type = other RNA
atggtgggggcggcacctcacaacctccgtcctgtgctgtg

SEQ ID NO: 6943 - RNA, 41 nt, synthetic construct
  source 1..41: mol_type = other RNA
tgggggcagcgcctcaaagtccccgtaatgtgctgtgactg

SEQ ID NO: 6944 - RNA, 42 nt, synthetic construct
  source 1..42: mol_type = other RNA
gcgctcatggagggggcagcgcttccacgacctccgtcatgt

SEQ ID NO: 6945 - RNA, 31 nt, synthetic construct
  source 1..31: mol_type = other RNA
cgctcaccgtgggggcagcgccttagaacct

SEQ ID NO: 6946 - RNA, 41 nt, synthetic construct
  source 1..41: mol_type = other RNA
tgagcagcggtcatggggggggcagcgcctcacaacctccg

SEQ ID NO: 6947 - RNA, 31 nt, synthetic construct
  source 1..31: mol_type = other RNA
tcatgatgggggcagcaccttataacctccg

SEQ ID NO: 6948 - RNA, 31 nt, synthetic construct
  source 1..31: mol_type = other RNA
tcatgatgggggcagcgcctcaccacctccg

SEQ ID NO: 6949 - RNA, 41 nt, synthetic construct
  source 1..41: mol_type = other RNA
gcgctcatggtggtggcagcgcctcacacctcacgtcatgt

SEQ ID NO: 6950 - RNA, 32 nt, synthetic construct
  source 1..32: mol_type = other RNA
tggtgggggcagcacctcacaaagctccgtca

SEQ ID NO: 6951 - RNA, 42 nt, synthetic construct
  source 1..42: mol_type = other RNA
tgggggcagcgccttatttaattccgttatctgctgtgactg

SEQ ID NO: 6952 - RNA, 31 nt, synthetic construct
  source 1..31: mol_type = other RNA
tggtgggggcagcgcattagaatctccgtca

SEQ ID NO: 6953 - RNA, 31 nt, synthetic construct
  source 1..31: mol_type = other RNA
cgctcatcgtgggggcagcgcattagaacct

SEQ ID NO: 6954 - RNA, 41 nt, synthetic construct
  source 1..41: mol_type = other RNA
atggtgggggcagcgcctcacaacctccgtcatgtgctgtg

SEQ ID NO: 6955 - RNA, 31 nt, synthetic construct
  source 1..31: mol_type = other RNA
gagcagctttcatgggtggggcagcgcctca

SEQ ID NO: 6956 - RNA, 41 nt, synthetic construct
  source 1..41: mol_type = other RNA
gcgctcatggtgagggcagcgcatcacaacctccgtcatgt

SEQ ID NO: 6957 - RNA, 31 nt, synthetic construct
  source 1..31: mol_type = other RNA
cgctcctggtgggggcggcgcctaccaacct

SEQ ID NO: 6958 - RNA, 31 nt, synthetic construct
  source 1..31: mol_type = other RNA
cgctcatggtgggggcagcgactcacaacct

SEQ ID NO: 6959 - RNA, 31 nt, synthetic construct
  source 1..31: mol_type = other RNA
cgctcatgttgggggcagcgcctcacaacct

SEQ ID NO: 6960 - RNA, 31 nt, synthetic construct
  source 1..31: mol_type = other RNA
gagcagagctcctggtgggggcagcacctca

SEQ ID NO: 6961 - RNA, 41 nt, synthetic construct
  source 1..41: mol_type = other RNA
tgagcagcgctcctggtgggggcagcacctcaaaacctccg

SEQ ID NO: 6962 - RNA, 31 nt, synthetic construct
  source 1..31: mol_type = other RNA
tcatgttgggggcaacacctggcaacctccg

SEQ ID NO: 6963 - RNA, 31 nt, synthetic construct
  source 1..31: mol_type = other RNA
gagcagcgctcatggtggcggcagcccctca

SEQ ID NO: 6964 - RNA, 31 nt, synthetic construct
  source 1..31: mol_type = other RNA
cgctcatggtggtggcagcacctcacaacct

SEQ ID NO: 6965 - RNA, 31 nt, synthetic construct
  source 1..31: mol_type = other RNA
gggcagcgccttagactctccgtcatgtgct

SEQ ID NO: 6966 - RNA, 31 nt, synthetic construct
  source 1..31: mol_type = other RNA
cgctcatgatgggggcagcgcctcacaacct

SEQ ID NO: 6967 - RNA, 41 nt, synthetic construct
  source 1..41: mol_type = other RNA
atggtgggcgcagcacctcccatcctccatcatgtgctgtg

SEQ ID NO: 6968 - RNA, 39 nt, synthetic construct
  source 1..39: mol_type = other RNA
gcgctcatggtgggggcagcgactcacaacccgtcatgt

SEQ ID NO: 6969 - RNA, 31 nt, synthetic construct
  source 1..31: mol_type = other RNA
cgctcatggtgggggcagcgcctctaaacct

SEQ ID NO: 6970 - RNA, 44 nt, synthetic construct
  source 1..44: mol_type = other RNA
atggtgggggcagcgcctcgcaaccacaaacgtcttgtgctgtg

SEQ ID NO: 6971 - RNA, 41 nt, synthetic construct
  source 1..41: mol_type = other RNA
atggtgggggcagcgcctaacaacctctgtcgtgtgctgtg

SEQ ID NO: 6972 - RNA, 41 nt, synthetic construct
  source 1..41: mol_type = other RNA
tgggggcagcgcatcatgacctccgtcatgtgctgtgactg

SEQ ID NO: 6973 - RNA, 41 nt, synthetic construct
  source 1..41: mol_type = other RNA
atggtgggggcagcgcctcacaacccacgtcatgtgctgtg

SEQ ID NO: 6974 - RNA, 31 nt, synthetic construct
  source 1..31: mol_type = other RNA
tggtgggggcagcgcgtcacaacttccgtca

SEQ ID NO: 6975 - RNA, 41 nt, synthetic construct
  source 1..41: mol_type = other RNA
tgggggcagcgcctaccaagctcagtcatgtgctgtgactg

SEQ ID NO: 6976 - RNA, 41 nt, synthetic construct
  source 1..41: mol_type = other RNA
tgggggcagcgcctcgcagcctccgtcatatgctgtgactg

SEQ ID NO: 6977 - RNA, 31 nt, synthetic construct
  source 1..31: mol_type = other RNA
tcatggtgggtagagcgccgcgcaaactccg

SEQ ID NO: 6978 - RNA, 41 nt, synthetic construct
  source 1..41: mol_type = other RNA
atggtgggggctgcgcctcagaacctccgtcatgtgctgtg

SEQ ID NO: 6979 - RNA, 41 nt, synthetic construct
  source 1..41: mol_type = other RNA
gcgctcatgatgggggcaacgcctcacaacctgcgtcatgt

SEQ ID NO: 6980 - RNA, 46 nt, synthetic construct
  source 1..46: mol_type = other RNA
gcgctcatggtgggggcggcgccccacaacacccactccgtcatgt

SEQ ID NO: 6981 - RNA, 41 nt, synthetic construct
  source 1..41: mol_type = other RNA
tgggggcagcgccgtacaacctccgtcatgtgctgtgactg

SEQ ID NO: 6982 - RNA, 42 nt, synthetic construct
  source 1..42: mol_type = other RNA
atggtgggggcatcaccttacaacactccgtcatgtgctgtg

SEQ ID NO: 6983 - RNA, 42 nt, synthetic construct
  source 1..42: mol_type = other RNA
tgggggcagcgccttaagagacgtcgtcatctgctgtgactg

SEQ ID NO: 6984 - RNA, 41 nt, synthetic construct
  source 1..41: mol_type = other RNA
atggtgggggtagcgcctctcaacctccgttatgtgctgtg

SEQ ID NO: 6985 - RNA, 42 nt, synthetic construct
  source 1..42: mol_type = other RNA
gctatctgtgcaccgctcgatggcggcggctgcgcctcacaa

SEQ ID NO: 6986 - RNA, 41 nt, synthetic construct
  source 1..41: mol_type = other RNA
tgagcagcgctcatggtggcggcagcccctcacaacctccg

SEQ ID NO: 6987 - RNA, 31 nt, synthetic construct
  source 1..31: mol_type = other RNA
tcatggtgggggccgcgcctcaccacctccg

SEQ ID NO: 6988 - RNA, 41 nt, synthetic construct
  source 1..41: mol_type = other RNA
atggtgggggcatcgcctcacaacctacgtcatgtgctgtg

SEQ ID NO: 6989 - RNA, 31 nt, synthetic construct
  source 1..31: mol_type = other RNA
cgctcgtagtgggggaagcaccccataacct

SEQ ID NO: 6990 - RNA, 31 nt, synthetic construct
  source 1..31: mol_type = other RNA
cgctcgtggtgggggcagcaccttacaacct

SEQ ID NO: 6991 - RNA, 31 nt, synthetic construct
  source 1..31: mol_type = other RNA
tcatggtgggggcaacgcctcaagacctccg

SEQ ID NO: 6992 - RNA, 31 nt, synthetic construct
  source 1..31: mol_type = other RNA
tcatggtgggggcagcgcctctaaatctccg

SEQ ID NO: 6993 - RNA, 31 nt, synthetic construct
  source 1..31: mol_type = other RNA
gggcagcgcctaccaacctacgtcatgtgct

SEQ ID NO: 6994 - RNA, 31 nt, synthetic construct
  source 1..31: mol_type = other RNA
cgctcatggtgagggcagcacctcacaacct

SEQ ID NO: 6995 - RNA, 31 nt, synthetic construct
  source 1..31: mol_type = other RNA
cgctcatggtgggtagagcgccgcgcaacct

SEQ ID NO: 6996 - RNA, 28 nt, synthetic construct
  source 1..28: mol_type = other RNA
tggtgggacggccgcctgatctgcgtca

SEQ ID NO: 6997 - RNA, 30 nt, synthetic construct
  source 1..30: mol_type = other RNA
gggcacgcctgatctgggtcctcatgtgct

SEQ ID NO: 6998 - RNA, 31 nt, synthetic construct
  source 1..31: mol_type = other RNA
gagcagcgctcatgatgggggcaacgcctca

SEQ ID NO: 6999 - RNA, 31 nt, synthetic construct
  source 1..31: mol_type = other RNA
gagcagtgctcatggtgggggcggcgcctca

SEQ ID NO: 7000 - RNA, 41 nt, synthetic construct
  source 1..41: mol_type = other RNA
atggtgggggcagcgcctcacaacctccgtcacgtgctgtg

SEQ ID NO: 7001 - RNA, 31 nt, synthetic construct
  source 1..31: mol_type = other RNA
gagcacggttcatggtgggggcagcgcctca

SEQ ID NO: 7002 - RNA, 41 nt, synthetic construct
  source 1..41: mol_type = other RNA
tgggggcagcgctccacaacctccgtcatgtgctgtgactg

SEQ ID NO: 7003 - RNA, 29 nt, synthetic construct
  source 1..29: mol_type = other RNA
cgctcatgcggggcagcacctcacaacct

SEQ ID NO: 7004 - RNA, 41 nt, synthetic construct
  source 1..41: mol_type = other RNA
atggtgggggcaacacctggcaacctctgtcatgtgctgtg

SEQ ID NO: 7005 - RNA, 30 nt, synthetic construct
  source 1..30: mol_type = other RNA
tggtggggtagcacctcaaggcctccgtca

SEQ ID NO: 7006 - RNA, 41 nt, synthetic construct
  source 1..41: mol_type = other RNA
tgagcagcgctcatggtgggggcggcgcctcacaacctccg

SEQ ID NO: 7007 - RNA, 31 nt, synthetic construct
  source 1..31: mol_type = other RNA
tcatggaaggggcagcaactcgcaaactccg

SEQ ID NO: 7008 - RNA, 41 nt, synthetic construct
  source 1..41: mol_type = other RNA
atggtgggggccgcgcatcacagtcaccgtcatgtgctgtg

SEQ ID NO: 7009 - RNA, 31 nt, synthetic construct
  source 1..31: mol_type = other RNA
tggtgggggcagcgccttagactctccgtca

SEQ ID NO: 7010 - RNA, 33 nt, synthetic construct
  source 1..33: mol_type = other RNA
tcatgtggggcagcaaactcagggtagcctccg

SEQ ID NO: 7011 - RNA, 41 nt, synthetic construct
  source 1..41: mol_type = other RNA
atggtggggggcgcacctcacgacctccgtcatgtgctgtg

SEQ ID NO: 7012 - RNA, 38 nt, synthetic construct
  source 1..38: mol_type = other RNA
gcgctcatatgggggcagcacctcgcaattcgtcatgt

SEQ ID NO: 7013 - RNA, 31 nt, synthetic construct
  source 1..31: mol_type = other RNA
cgctcatggtgggcgcagcacctcccaacct

SEQ ID NO: 7014 - RNA, 31 nt, synthetic construct
  source 1..31: mol_type = other RNA
gagcagctctaatgatgggggccgcgcctca

SEQ ID NO: 7015 - RNA, 32 nt, synthetic construct
  source 1..32: mol_type = other RNA
tcatggtgggggcagcaccttacaattctccg

SEQ ID NO: 7016 - RNA, 30 nt, synthetic construct
  source 1..30: mol_type = other RNA
tggtgggggcagcgccttacaaatccgtca

SEQ ID NO: 7017 - RNA, 31 nt, synthetic construct
  source 1..31: mol_type = other RNA
gagcagcgttcatggtgggggcaacgcctca

SEQ ID NO: 7018 - RNA, 31 nt, synthetic construct
  source 1..31: mol_type = other RNA
tcatggtgggggcagcgcctaccaagctccg

SEQ ID NO: 7019 - RNA, 40 nt, synthetic construct
  source 1..40: mol_type = other RNA
atggtgggggcagcgcatcacaacctcgacatgtgctgtg

SEQ ID NO: 7020 - RNA, 31 nt, synthetic construct
  source 1..31: mol_type = other RNA
cgctcatggtgagggcagcgcatcacaacct

SEQ ID NO: 7021 - RNA, 41 nt, synthetic construct
  source 1..41: mol_type = other RNA
atggtgggggtagcgcctcacaacctccgtcatgtgctgtg

SEQ ID NO: 7022 - RNA, 41 nt, synthetic construct
  source 1..41: mol_type = other RNA
tgggggcagcgcctcataacctccgtcatgtgatgtgactg

SEQ ID NO: 7023 - RNA, 31 nt, synthetic construct
  source 1..31: mol_type = other RNA
gggcagcgcctcccccactacgtcatgtgct

SEQ ID NO: 7024 - RNA, 31 nt, synthetic construct
  source 1..31: mol_type = other RNA
tcatggtgggggcagcgcctcccgatctccg

SEQ ID NO: 7025 - RNA, 31 nt, synthetic construct
  source 1..31: mol_type = other RNA
gagcagcgttcatggcaaaggctgcgcctca

SEQ ID NO: 7026 - RNA, 31 nt, synthetic construct
  source 1..31: mol_type = other RNA
cgctcatggtgggggcggcgccccacaacct

SEQ ID NO: 7027 - RNA, 41 nt, synthetic construct
  source 1..41: mol_type = other RNA
tgggggcagcgcctcgccacctccgtcatgtgctgtgactg

SEQ ID NO: 7028 - RNA, 31 nt, synthetic construct
  source 1..31: mol_type = other RNA
tggtgggggcagcgctccacaacctccgtca

SEQ ID NO: 7029 - RNA, 41 nt, synthetic construct
  source 1..41: mol_type = other RNA
tgagcagctctactggtgggggcagcgctccacaacctccg

SEQ ID NO: 7030 - RNA, 42 nt, synthetic construct
  source 1..42: mol_type = other RNA
tgagcagcgctcctggtggggagcagcaaatcgcaacctccg

SEQ ID NO: 7031 - RNA, 40 nt, synthetic construct
  source 1..40: mol_type = other RNA
gcgctcatggtgaggcagcgcctcacaacctccgtcatgt

SEQ ID NO: 7032 - RNA, 31 nt, synthetic construct
  source 1..31: mol_type = other RNA
tggtgggggcagcgcctcaacactcccgtca

SEQ ID NO: 7033 - RNA, 41 nt, synthetic construct
  source 1..41: mol_type = other RNA
tgggggcagcgcctaacaacctccgtcatgtgctgtgactg

SEQ ID NO: 7034 - RNA, 41 nt, synthetic construct
  source 1..41: mol_type = other RNA
tgggggcaacgccttataacctccgtcatgtgctgtgactg

SEQ ID NO: 7035 - RNA, 31 nt, synthetic construct
  source 1..31: mol_type = other RNA
cgctcatggtgggggcaacgccttataacct

SEQ ID NO: 7036 - RNA, 31 nt, synthetic construct
  source 1..31: mol_type = other RNA
gagcagcgctcatcttgggggcaacacctca

SEQ ID NO: 7037 - RNA, 31 nt, synthetic construct
  source 1..31: mol_type = other RNA
cgctcctggtggacgcagcacctcccaacct

SEQ ID NO: 7038 - RNA, 31 nt, synthetic construct
  source 1..31: mol_type = other RNA
gggcagcacctcaaggcctccgtcatgtgct

SEQ ID NO: 7039 - RNA, 40 nt, synthetic construct
  source 1..40: mol_type = other RNA
tgagcagcgctcatggtagggtagcacctcaaaacctccg

SEQ ID NO: 7040 - RNA, 41 nt, synthetic construct
  source 1..41: mol_type = other RNA
atggtgggggctgcgcctctcaacctccgtcatgtgctgtg

SEQ ID NO: 7041 - RNA, 32 nt, synthetic construct
  source 1..32: mol_type = other RNA
tggtggagagcagcgcatcaacacctccgtca

SEQ ID NO: 7042 - RNA, 41 nt, synthetic construct
  source 1..41: mol_type = other RNA
tgggggcagcgccttagactctccgtcatgtgctgtgactg

SEQ ID NO: 7043 - RNA, 41 nt, synthetic construct
  source 1..41: mol_type = other RNA
atggtgggggcagcgccttagactctccgtcatgtgctgtg

SEQ ID NO: 7044 - RNA, 41 nt, synthetic construct
  source 1..41: mol_type = other RNA
tgggggcagcgcctcacaaactccgtcatgtgatgtgactg

SEQ ID NO: 7045 - RNA, 31 nt, synthetic construct
  source 1..31: mol_type = other RNA
cgctcatggtgggggcatcgcctcacaacct

SEQ ID NO: 7046 - RNA, 39 nt, synthetic construct
  source 1..39: mol_type = other RNA
atggtgggggcagcacctcgcaattcgtcatgtgctgtg

SEQ ID NO: 7047 - RNA, 31 nt, synthetic construct
  source 1..31: mol_type = other RNA
gggcagcacctcccatcctccatcatgtgct

SEQ ID NO: 7048 - RNA, 43 nt, synthetic construct
  source 1..43: mol_type = other RNA
tgggggcagcacctcgccccctccgtcatggaagctgtgactg

SEQ ID NO: 7049 - RNA, 30 nt, synthetic construct
  source 1..30: mol_type = other RNA
gagcaccgttcatgtgggggcagcacctca

SEQ ID NO: 7050 - RNA, 31 nt, synthetic construct
  source 1..31: mol_type = other RNA
gggcagcacctcgccccctccgtcatgtgct

SEQ ID NO: 7051 - RNA, 31 nt, synthetic construct
  source 1..31: mol_type = other RNA
gggcagcgcctcaccgtctccgtcatgtgct

SEQ ID NO: 7052 - RNA, 41 nt, synthetic construct
  source 1..41: mol_type = other RNA
atggtgggggcagcaccttacaattctccccatgtgctgtg

SEQ ID NO: 7053 - RNA, 31 nt, synthetic construct
  source 1..31: mol_type = other RNA
gagcagagcttatggtgggggcagcgcctca

SEQ ID NO: 7054 - RNA, 41 nt, synthetic construct
  source 1..41: mol_type = other RNA
gcgctcatggtgggggcaacgcctcacaacctgcgtcatgt

SEQ ID NO: 7055 - RNA, 31 nt, synthetic construct
  source 1..31: mol_type = other RNA
tcatggtgggggcagcgcctaacaacctccg

SEQ ID NO: 7056 - RNA, 31 nt, synthetic construct
  source 1..31: mol_type = other RNA
tcatggtgggggcagcgcctcccggcctccg

SEQ ID NO: 7057 - RNA, 41 nt, synthetic construct
  source 1..41: mol_type = other RNA
atggtgggggcagcgcctcccggcctccgtcatgtgctgtg

SEQ ID NO: 7058 - RNA, 31 nt, synthetic construct
  source 1..31: mol_type = other RNA
gggcagcgcatcacagtctacgtcatgtgct

SEQ ID NO: 7059 - RNA, 40 nt, synthetic construct
  source 1..40: mol_type = other RNA
tgggggcagcgcatcacaacctcgacatgtggtgtgactg

SEQ ID NO: 7060 - RNA, 41 nt, synthetic construct
  source 1..41: mol_type = other RNA
tgggggcagcgcctcccccactacgtcatgtgctgtgactg

SEQ ID NO: 7061 - RNA, 41 nt, synthetic construct
  source 1..41: mol_type = other RNA
atggtgggggcagcgcctcccccactacgtcatgtgctgtg

SEQ ID NO: 7062 - RNA, 31 nt, synthetic construct
  source 1..31: mol_type = other RNA
cgctcatggtagggggagcgcctcacaacct

SEQ ID NO: 7063 - RNA, 31 nt, synthetic construct
  source 1..31: mol_type = other RNA
tggtgaaggctgcgcctcagaacctccgtca

SEQ ID NO: 7064 - RNA, 31 nt, synthetic construct
  source 1..31: mol_type = other RNA
tcatggtgggggcagcgactcacaccctccg

SEQ ID NO: 7065 - RNA, 41 nt, synthetic construct
  source 1..41: mol_type = other RNA
atggtggggggagcgcctcacaacctcagtcgtgtgctgtg

SEQ ID NO: 7066 - RNA, 45 nt, synthetic construct
  source 1..45: mol_type = other RNA
tgggggcagcaccttagcaaacctcccaatcatgtgctgtgactg

SEQ ID NO: 7067 - RNA, 31 nt, synthetic construct
  source 1..31: mol_type = other RNA
cgctcctggtgggggcagcacctcccaacct

SEQ ID NO: 7068 - RNA, 31 nt, synthetic construct
  source 1..31: mol_type = other RNA
cgctcatgatgggggcaacgcctcacaacct

SEQ ID NO: 7069 - RNA, 31 nt, synthetic construct
  source 1..31: mol_type = other RNA
tcatggtgggggcagcgctccacaacctccg

SEQ ID NO: 7070 - RNA, 31 nt, synthetic construct
  source 1..31: mol_type = other RNA
gagcagctctactggtgggggcagcgcctca

SEQ ID NO: 7071 - RNA, 31 nt, synthetic construct
  source 1..31: mol_type = other RNA
gggcagcacctcaaaatccccgtcatgtgct

SEQ ID NO: 7072 - RNA, 31 nt, synthetic construct
  source 1..31: mol_type = other RNA
tcatgatgggggcagcgcatcacggcctccg

SEQ ID NO: 7073 - RNA, 37 nt, synthetic construct
  source 1..37: mol_type = other RNA
gggcagcgcctccttgtcacaaccgccgtcaggtgct

SEQ ID NO: 7074 - RNA, 39 nt, synthetic construct
  source 1..39: mol_type = other RNA
tgagcagcgcccatgcggggcagcacctcacaacctccg

SEQ ID NO: 7075 - RNA, 26 nt, synthetic construct
  source 1..26: mol_type = other RNA
gggcagcgcctcacaacctctgtgct

SEQ ID NO: 7076 - RNA, 31 nt, synthetic construct
  source 1..31: mol_type = other RNA
gggcagcgcctcaacactcccgtcatgtgct

SEQ ID NO: 7077 - RNA, 31 nt, synthetic construct
  source 1..31: mol_type = other RNA
tcatggtgggggcggcgcctcataacctccg

SEQ ID NO: 7078 - RNA, 31 nt, synthetic construct
  source 1..31: mol_type = other RNA
cgctcatggtgtgggcagcacctcccaacct

SEQ ID NO: 7079 - RNA, 41 nt, synthetic construct
  source 1..41: mol_type = other RNA
tgagcagcgtccatggtgggggcagcgcaccccaacctccg

SEQ ID NO: 7080 - RNA, 42 nt, synthetic construct
  source 1..42: mol_type = other RNA
tgggggcagcgcctcacaacctctgtcatgtgactgtgactg

SEQ ID NO: 7081 - RNA, 31 nt, synthetic construct
  source 1..31: mol_type = other RNA
gagcagcgcgaatggtgggggccgcgcctca

SEQ ID NO: 7082 - RNA, 41 nt, synthetic construct
  source 1..41: mol_type = other RNA
tgggggcagcaactcacaacctcagtcatgcgctgtgactg

SEQ ID NO: 7083 - RNA, 31 nt, synthetic construct
  source 1..31: mol_type = other RNA
gggcagcgcctctcaacctccgtcatgtgct

SEQ ID NO: 7084 - RNA, 41 nt, synthetic construct
  source 1..41: mol_type = other RNA
tgggggcagcaactcgcaaactctgtcatgtgctgtgactg

SEQ ID NO: 7085 - RNA, 47 nt, synthetic construct
  source 1..47: mol_type = other RNA
tgggggcaacacctccatcacatctgtaatgtgaaaaactgtgactg

SEQ ID NO: 7086 - RNA, 31 nt, synthetic construct
  source 1..31: mol_type = other RNA
tggtgggggcagcgccccacgacttccgtca

SEQ ID NO: 7087 - RNA, 41 nt, synthetic construct
  source 1..41: mol_type = other RNA
tgggggcagcgcatcaacacctctgtcatgtgctgtgactg

SEQ ID NO: 7088 - RNA, 41 nt, synthetic construct
  source 1..41: mol_type = other RNA
tgggggcagcgcatcacagtcaccgtcatgtgctgtgactg

SEQ ID NO: 7089 - RNA, 31 nt, synthetic construct
  source 1..31: mol_type = other RNA
gagcagaactcatggtggcggccgcgcctca

SEQ ID NO: 7090 - RNA, 31 nt, synthetic construct
  source 1..31: mol_type = other RNA
tggtggtggcagcacctcacaccccacgtca

SEQ ID NO: 7091 - RNA, 34 nt, synthetic construct
  source 1..34: mol_type = other RNA
tggtgggggcagcgcctcacaccaacctccgtca

SEQ ID NO: 7092 - RNA, 31 nt, synthetic construct
  source 1..31: mol_type = other RNA
cgctcatggtgggggcagcacctcacaacct

SEQ ID NO: 7093 - RNA, 31 nt, synthetic construct
  source 1..31: mol_type = other RNA
tcatggtgggggcagcacctcgccccctccg

SEQ ID NO: 7094 - RNA, 41 nt, synthetic construct
  source 1..41: mol_type = other RNA
tgggggcagcgcctcaccgtctccgtcatgtgttgtgactg

SEQ ID NO: 7095 - RNA, 49 nt, synthetic construct
  source 1..49: mol_type = other RNA
tggtgggtgaagcttctccgcccatttttaactcctcgttcatccgtca

SEQ ID NO: 7096 - RNA, 31 nt, synthetic construct
  source 1..31: mol_type = other RNA
tcatggtgggggcagcgcctaccgcactccg

SEQ ID NO: 7097 - RNA, 31 nt, synthetic construct
  source 1..31: mol_type = other RNA
gagcatagctcatggtgggggcggcgcctca

SEQ ID NO: 7098 - RNA, 31 nt, synthetic construct
  source 1..31: mol_type = other RNA
tcatggtgggggcagcgactcacaacctccg

SEQ ID NO: 7099 - RNA, 31 nt, synthetic construct
  source 1..31: mol_type = other RNA
tggtgggggcagcgccacgcaatttccgtca

SEQ ID NO: 7100 - RNA, 31 nt, synthetic construct
  source 1..31: mol_type = other RNA
tcatggtgggggcagcgcctcaccacctccg

SEQ ID NO: 7101 - RNA, 32 nt, synthetic construct
  source 1..32: mol_type = other RNA
cgctcatggtgaagtgcagcgcctcacaacct

SEQ ID NO: 7102 - RNA, 41 nt, synthetic construct
  source 1..41: mol_type = other RNA
tgggggcagcgccttagaacctccgtcatgtaatgtgactg

SEQ ID NO: 7103 - RNA, 31 nt, synthetic construct
  source 1..31: mol_type = other RNA
tcatggtgggggcagcgcctcacacactccg

SEQ ID NO: 7104 - RNA, 31 nt, synthetic construct
  source 1..31: mol_type = other RNA
cgctcgtggtgggggcagcgccttacaacct

SEQ ID NO: 7105 - RNA, 41 nt, synthetic construct
  source 1..41: mol_type = other RNA
tgggggcagcgcctaacaacctctgtcgtgtgctgtgactg

SEQ ID NO: 7106 - RNA, 41 nt, synthetic construct
  source 1..41: mol_type = other RNA
tgggggcagcgcattagaatctccgtcgtgtgctgtgactg

SEQ ID NO: 7107 - RNA, 31 nt, synthetic construct
  source 1..31: mol_type = other RNA
tcatggtgggggcggcgcctcatcacctccg

SEQ ID NO: 7108 - RNA, 41 nt, synthetic construct
  source 1..41: mol_type = other RNA
atggtgggggcagcgcctaccaagctcagtcatgtgctgtg

SEQ ID NO: 7109 - RNA, 44 nt, synthetic construct
  source 1..44: mol_type = other RNA
gctatctgagcagggctcatggtggggacaacaacgcctcacaa

SEQ ID NO: 7110 - RNA, 31 nt, synthetic construct
  source 1..31: mol_type = other RNA
tggtgggggcagcgcatcacagtctacgtca

SEQ ID NO: 7111 - RNA, 41 nt, synthetic construct
  source 1..41: mol_type = other RNA
tgggggcagcgcctcacaacttccgtcatatgctgtgactg

SEQ ID NO: 7112 - RNA, 31 nt, synthetic construct
  source 1..31: mol_type = other RNA
tcatggtgggggcagcgcctcccccactccg

SEQ ID NO: 7113 - RNA, 31 nt, synthetic construct
  source 1..31: mol_type = other RNA
cgctcatggcaaaggctgcgcctcagaacct

SEQ ID NO: 7114 - RNA, 29 nt, synthetic construct
  source 1..29: mol_type = other RNA
tggtgggggcagcgactcacaccccgtca

SEQ ID NO: 7115 - RNA, 41 nt, synthetic construct
  source 1..41: mol_type = other RNA
tgggggcagcgcctcacaacctctgtcaagtgctgtgactg

SEQ ID NO: 7116 - RNA, 41 nt, synthetic construct
  source 1..41: mol_type = other RNA
atggtgggggcagcgcctcacaacctctgtcaagtgctgtg

SEQ ID NO: 7117 - RNA, 38 nt, synthetic construct
  source 1..38: mol_type = other RNA
atggtgggggcagcgcctctacaaccatcagtgctgtg

SEQ ID NO: 7118 - RNA, 31 nt, synthetic construct
  source 1..31: mol_type = other RNA
cgctcatggtggggggagcgcctcacaacct

SEQ ID NO: 7119 - RNA, 31 nt, synthetic construct
  source 1..31: mol_type = other RNA
tcatggtgggggcagcacctcccattctccg

SEQ ID NO: 7120 - RNA, 41 nt, synthetic construct
  source 1..41: mol_type = other RNA
atggtgggggcagcgcctcgccacctccgtcatgtgctgtg

SEQ ID NO: 7121 - RNA, 32 nt, synthetic construct
  source 1..32: mol_type = other RNA
tcatggtggggagcagcaaatcgcgggctccg

SEQ ID NO: 7122 - RNA, 32 nt, synthetic construct
  source 1..32: mol_type = other RNA
tggtggggagcagcaaatcgcgggctccgtca

SEQ ID NO: 7123 - RNA, 42 nt, synthetic construct
  source 1..42: mol_type = other RNA
tgggggcagcgcatcacaccctccgtcaatgtgctgtgactg

SEQ ID NO: 7124 - RNA, 42 nt, synthetic construct
  source 1..42: mol_type = other RNA
atggtgggggcagcgcatcacaccctccgtcaatgtgctgtg

SEQ ID NO: 7125 - RNA, 31 nt, synthetic construct
  source 1..31: mol_type = other RNA
cgctcatggtgggggcatcaccttacaacct

SEQ ID NO: 7126 - RNA, 31 nt, synthetic construct
  source 1..31: mol_type = other RNA
cgctcatgatgggggcagcgcatcacaacct

SEQ ID NO: 7127 - RNA, 37 nt, synthetic construct
  source 1..37: mol_type = other RNA
tcatggttagggcagcgcctccttgtcacaacctccg

SEQ ID NO: 7128 - RNA, 30 nt, synthetic construct
  source 1..30: mol_type = other RNA
tggtggggcagcacctcacaacctccgtca

SEQ ID NO: 7129 - RNA, 41 nt, synthetic construct
  source 1..41: mol_type = other RNA
tgggggcaacacctggcaacctctgtcatgtgctgtgactg

SEQ ID NO: 7130 - RNA, 31 nt, synthetic construct
  source 1..31: mol_type = other RNA
cgctcatcttgggggcaacacctggcaacct

SEQ ID NO: 7131 - RNA, 30 nt, synthetic construct
  source 1..30: mol_type = other RNA
cgctcatggtagggtagcacctcaaaacct

SEQ ID NO: 7132 - RNA, 31 nt, synthetic construct
  source 1..31: mol_type = other RNA
tcatggtgggggcggcgcctcacaccctccg

SEQ ID NO: 7133 - RNA, 41 nt, synthetic construct
  source 1..41: mol_type = other RNA
tgggggcagcgcatcaccccctacgtcatgtgctgtgactg

SEQ ID NO: 7134 - RNA, 41 nt, synthetic construct
  source 1..41: mol_type = other RNA
gcgctcatggtggcggcagcccctcacaacctccgtcatgt

SEQ ID NO: 7135 - RNA, 41 nt, synthetic construct
  source 1..41: mol_type = other RNA
gcgctcatggaaggggcagcaactcgcaaactccgtcatgt

SEQ ID NO: 7136 - RNA, 31 nt, synthetic construct
  source 1..31: mol_type = other RNA
gggcagcgcctcaccacctccgtcatgtgct

SEQ ID NO: 7137 - RNA, 31 nt, synthetic construct
  source 1..31: mol_type = other RNA
tggtgggggcagcgcctcacgatttccgtca

SEQ ID NO: 7138 - RNA, 32 nt, synthetic construct
  source 1..32: mol_type = other RNA
tggtgggggcagcgccttacaaaactccgtca

SEQ ID NO: 7139 - RNA, 32 nt, synthetic construct
  source 1..32: mol_type = other RNA
gggcagcgccttacaaaactccaacatgtgct

SEQ ID NO: 7140 - RNA, 31 nt, synthetic construct
  source 1..31: mol_type = other RNA
gggcagcacctcacaccccacgtcatgtgct

SEQ ID NO: 7141 - RNA, 31 nt, synthetic construct
  source 1..31: mol_type = other RNA
tcatggtgggcgcagcgcctcaaagtctccg

SEQ ID NO: 7142 - RNA, 31 nt, synthetic construct
  source 1..31: mol_type = other RNA
tggtggtggcagcgcctcacacctcacgtca

SEQ ID NO: 7143 - RNA, 41 nt, synthetic construct
  source 1..41: mol_type = other RNA
atggtgggggcagcgcctcacacactgacttaggtgctgtg

SEQ ID NO: 7144 - RNA, 31 nt, synthetic construct
  source 1..31: mol_type = other RNA
tcatggtgggggcagcacctcaagatctccg

SEQ ID NO: 7145 - RNA, 31 nt, synthetic construct
  source 1..31: mol_type = other RNA
cgctcatggtgggggcagcacctcaaaacct

SEQ ID NO: 7146 - RNA, 31 nt, synthetic construct
  source 1..31: mol_type = other RNA
tggtgggggaagcaccccataaccttcgtca

SEQ ID NO: 7147 - RNA, 40 nt, synthetic construct
  source 1..40: mol_type = other RNA
tgggggcagcacctaccaacctccgccaagtctgtgactg

SEQ ID NO: 7148 - RNA, 32 nt, synthetic construct
  source 1..32: mol_type = other RNA
gggcagcacctcacaaagctccaccatgtgct

SEQ ID NO: 7149 - RNA, 42 nt, synthetic construct
  source 1..42: mol_type = other RNA
tgggggcagcgcctcaagacaagacgtcatctgctgtgactg

SEQ ID NO: 7150 - RNA, 33 nt, synthetic construct
  source 1..33: mol_type = other RNA
tcatggtgggggcggcgcctcaccaaacctccg

SEQ ID NO: 7151 - RNA, 32 nt, synthetic construct
  source 1..32: mol_type = other RNA
gggcagcaccttacaattctccctcatgtgct

SEQ ID NO: 7152 - RNA, 31 nt, synthetic construct
  source 1..31: mol_type = other RNA
gagcagcgcccatggtgggcgcagcgcctca

SEQ ID NO: 7153 - RNA, 31 nt, synthetic construct
  source 1..31: mol_type = other RNA
tcatggtgggggcaacgcctcacaacctccg

SEQ ID NO: 7154 - RNA, 31 nt, synthetic construct
  source 1..31: mol_type = other RNA
tggtgagggcagcacctcacaacctccgtca

SEQ ID NO: 7155 - RNA, 34 nt, synthetic construct
  source 1..34: mol_type = other RNA
tggtggggacaacaacgcctcacgatttccgtca

SEQ ID NO: 7156 - RNA, 41 nt, synthetic construct
  source 1..41: mol_type = other RNA
tgggggcagcgcctcacaacctccgtcatgtgatgtgactg

SEQ ID NO: 7157 - RNA, 41 nt, synthetic construct
  source 1..41: mol_type = other RNA
atggtgggggcagcgccacgcaatttccgacatgtgctgtg

SEQ ID NO: 7158 - RNA, 31 nt, synthetic construct
  source 1..31: mol_type = other RNA
tcatggtaggggcagcgcctcgccccctccg

SEQ ID NO: 7159 - RNA, 31 nt, synthetic construct
  source 1..31: mol_type = other RNA
tggtgggggcagcgcctcgccccctccgtca

SEQ ID NO: 7160 - RNA, 31 nt, synthetic construct
  source 1..31: mol_type = other RNA
tcatggtggaggcagcgcctcacaacctccg

SEQ ID NO: 7161 - RNA, 41 nt, synthetic construct
  source 1..41: mol_type = other RNA
tgggggcagcgcctcccggcctccgtcatgagctgtgactg

SEQ ID NO: 7162 - RNA, 44 nt, synthetic construct
  source 1..44: mol_type = other RNA
gcgctcatggtggggacaacaacgcctcacgatttccgtcatgt

SEQ ID NO: 7163 - RNA, 40 nt, synthetic construct
  source 1..40: mol_type = other RNA
tgggggcagcgcatcacagtctacgtcattgctgtgactg

SEQ ID NO: 7164 - RNA, 41 nt, synthetic construct
  source 1..41: mol_type = other RNA
atggtgggggcagcgcatcacagtctacgtcatgtgctgtg

SEQ ID NO: 7165 - RNA, 31 nt, synthetic construct
  source 1..31: mol_type = other RNA
cgctcatgggaggggcagcgcatcacaacct

SEQ ID NO: 7166 - RNA, 28 nt, synthetic construct
  source 1..28: mol_type = other RNA
tcatggtgggacggccgcctgatctccg

SEQ ID NO: 7167 - RNA, 31 nt, synthetic construct
  source 1..31: mol_type = other RNA
gagcagccatcatggtgggcgcagcgcctca

SEQ ID NO: 7168 - RNA, 41 nt, synthetic construct
  source 1..41: mol_type = other RNA
tgggggcagcgcctggcgacctccgtcatgtgctgtgactg

SEQ ID NO: 7169 - RNA, 33 nt, synthetic construct
  source 1..33: mol_type = other RNA
tggtgggggcagcgcctctacaaccatccgtca

SEQ ID NO: 7170 - RNA, 31 nt, synthetic construct
  source 1..31: mol_type = other RNA
tcatggtggggggagcgcctcacaacctccg

SEQ ID NO: 7171 - RNA, 41 nt, synthetic construct
  source 1..41: mol_type = other RNA
tgggggcagcgcctcacaacctcagtcgtgtgatgtgactg

SEQ ID NO: 7172 - RNA, 31 nt, synthetic construct
  source 1..31: mol_type = other RNA
tggtgggggcagcacctcccattcgccgtca

SEQ ID NO: 7173 - RNA, 31 nt, synthetic construct
  source 1..31: mol_type = other RNA
gggcagcacctcccattcgccgccatgtgct

SEQ ID NO: 7174 - RNA, 31 nt, synthetic construct
  source 1..31: mol_type = other RNA
tcatggtgggggcggcgccccacaacctccg

SEQ ID NO: 7175 - RNA, 41 nt, synthetic construct
  source 1..41: mol_type = other RNA
tgggggcagcgcctcgcaacctacgtcatctgctgtgactg

SEQ ID NO: 7176 - RNA, 41 nt, synthetic construct
  source 1..41: mol_type = other RNA
atggtggggagcagcaaatcgcgggctcgtcatgtgctgtg

SEQ ID NO: 7177 - RNA, 39 nt, synthetic construct
  source 1..39: mol_type = other RNA
gctatctgagcagcgctcatggaggcgcagccctcacaa

SEQ ID NO: 7178 - RNA, 40 nt, synthetic construct
  source 1..40: mol_type = other RNA
atggtgggcgcagcctcactaacgtccgtcaggtgctgtg

SEQ ID NO: 7179 - RNA, 31 nt, synthetic construct
  source 1..31: mol_type = other RNA
tggtgggggcagcgcatcacaccctccgtca

SEQ ID NO: 7180 - RNA, 31 nt, synthetic construct
  source 1..31: mol_type = other RNA
gggcagcacctcacaacctccctcatgtgct

SEQ ID NO: 7181 - RNA, 54 nt, synthetic construct
  source 1..54: mol_type = other RNA
tgggggcagcacctcccaatctccgccatgtgaggcgcaggttgcctgtgactg

SEQ ID NO: 7182 - RNA, 31 nt, synthetic construct
  source 1..31: mol_type = other RNA
tcatggtgggggcagcgcctcaacacctccg

SEQ ID NO: 7183 - RNA, 31 nt, synthetic construct
  source 1..31: mol_type = other RNA
tcatggtataggacaagcctcaaaacctccg

SEQ ID NO: 7184 - RNA, 31 nt, synthetic construct
  source 1..31: mol_type = other RNA
gagcagcgatcctggtggacgcagcacctca

SEQ ID NO: 7185 - RNA, 31 nt, synthetic construct
  source 1..31: mol_type = other RNA
tggtggacgcagcacctcccaccctccgtca

SEQ ID NO: 7186 - RNA, 41 nt, synthetic construct
  source 1..41: mol_type = other RNA
tgagcagcgatcctggtggacgcagcacctcccaacctccg

SEQ ID NO: 7187 - RNA, 31 nt, synthetic construct
  source 1..31: mol_type = other RNA
tcatggtgggggcggcacctcacaacctccg

SEQ ID NO: 7188 - RNA, 31 nt, synthetic construct
  source 1..31: mol_type = other RNA
cgctcaaggtgggggcggcacctcacaacct

SEQ ID NO: 7189 - RNA, 31 nt, synthetic construct
  source 1..31: mol_type = other RNA
tcatggtgggggcagcgcaccccaacctccg

SEQ ID NO: 7190 - RNA, 41 nt, synthetic construct
  source 1..41: mol_type = other RNA
atggtgggggcagcgcaccccaacctccgtcatgtgctgtg

SEQ ID NO: 7191 - RNA, 31 nt, synthetic construct
  source 1..31: mol_type = other RNA
tcatggtgggggccgcgcctcacaacctccg

SEQ ID NO: 7192 - RNA, 41 nt, synthetic construct
  source 1..41: mol_type = other RNA
tgagcagcgcgaatggtgggggccgcgcctcacaacctccg

SEQ ID NO: 7193 - RNA, 33 nt, synthetic construct
  source 1..33: mol_type = other RNA
gagcaacgctcatgggtgaacagcagcgcctca

SEQ ID NO: 7194 - RNA, 31 nt, synthetic construct
  source 1..31: mol_type = other RNA
cgctcatggtggcggcagcccctcacaacct

SEQ ID NO: 7195 - RNA, 41 nt, synthetic construct
  source 1..41: mol_type = other RNA
atggtgggggcagcaactcgcaaactctgtcatgtgctgtg

SEQ ID NO: 7196 - RNA, 31 nt, synthetic construct
  source 1..31: mol_type = other RNA
tggtgggggccgcgcctcaccacctccgtca

SEQ ID NO: 7197 - RNA, 31 nt, synthetic construct
  source 1..31: mol_type = other RNA
tcatggcgggggcagcgccccacgacctccg

SEQ ID NO: 7198 - RNA, 31 nt, synthetic construct
  source 1..31: mol_type = other RNA
tcatggtgggggcagcgccttacaaactccg

SEQ ID NO: 7199 - RNA, 31 nt, synthetic construct
  source 1..31: mol_type = other RNA
tcatggtggtggcagcacctcacaccctccg

SEQ ID NO: 7200 - RNA, 41 nt, synthetic construct
  source 1..41: mol_type = other RNA
gctatctgaacagccgtaatggtgggcgcagcgcctcacaa

SEQ ID NO: 7201 - RNA, 31 nt, synthetic construct
  source 1..31: mol_type = other RNA
gagcagccgtaatggtgggcgcagcgcctca

SEQ ID NO: 7202 - RNA, 41 nt, synthetic construct
  source 1..41: mol_type = other RNA
tgagcagccgtaatggtgggcgcagcgcctcaaaacctccg

SEQ ID NO: 7203 - RNA, 35 nt, synthetic construct
  source 1..35: mol_type = other RNA
gggcagcacctctctaacaacctccgtcatgtgct

SEQ ID NO: 7204 - RNA, 41 nt, synthetic construct
  source 1..41: mol_type = other RNA
atggtgggggcagcgcctaagagtctacgtcatgtgctgtg

SEQ ID NO: 7205 - RNA, 29 nt, synthetic construct
  source 1..29: mol_type = other RNA
gagcagcgcacttatggggcagcacctca

SEQ ID NO: 7206 - RNA, 33 nt, synthetic construct
  source 1..33: mol_type = other RNA
cgctcttatggggcagcaaactcagggtaacct

SEQ ID NO: 7207 - RNA, 44 nt, synthetic construct
  source 1..44: mol_type = other RNA
atggtgggggcagcgcctcacaccaacctccgttatgtgctgtg

SEQ ID NO: 7208 - RNA, 34 nt, synthetic construct
  source 1..34: mol_type = other RNA
gggcagcgcctcacaccaacctccgttatgtgct

SEQ ID NO: 7209 - RNA, 29 nt, synthetic construct
  source 1..29: mol_type = other RNA
tggtgggggcagcacctcgcaattcgtca

SEQ ID NO: 7210 - RNA, 31 nt, synthetic construct
  source 1..31: mol_type = other RNA
tcatggtgggcgcagcacctcccatcctccg

SEQ ID NO: 7211 - RNA, 31 nt, synthetic construct
  source 1..31: mol_type = other RNA
gagcagagctgatggtgggcgcagcacctca

SEQ ID NO: 7212 - RNA, 31 nt, synthetic construct
  source 1..31: mol_type = other RNA
tcatgatgggggccgcgcctcaccgtctccg

SEQ ID NO: 7213 - RNA, 59 nt, synthetic construct
  source 1..59: mol_type = other RNA
atggtgggtgaagcttctccgcccatttttaactcctcgttcatctgacatgtgctgtg

SEQ ID NO: 7214 - RNA, 31 nt, synthetic construct
  source 1..31: mol_type = other RNA
tggtgggggcaacgcctcaagacctacgtca

SEQ ID NO: 7215 - RNA, 29 nt, synthetic construct
  source 1..29: mol_type = other RNA
tcatggtgggggcggcgcctcaacctccg

SEQ ID NO: 7216 - RNA, 39 nt, synthetic construct
  source 1..39: mol_type = other RNA
atggtgggggcagcgactcacaacccgtcgcgtgctgtg

SEQ ID NO: 7217 - RNA, 29 nt, synthetic construct
  source 1..29: mol_type = other RNA
tggtgggggcagcgactcacaacccgtca

SEQ ID NO: 7218 - RNA, 42 nt, synthetic construct
  source 1..42: mol_type = other RNA
atggtgggggcagcgccttacaaatcaaacacatgtgctgtg

SEQ ID NO: 7219 - RNA, 31 nt, synthetic construct
  source 1..31: mol_type = other RNA
gggcagcgcctctaaatcttcgcaatgtgct

SEQ ID NO: 7220 - RNA, 34 nt, synthetic construct
  source 1..34: mol_type = other RNA
gggcagcgcctcgcaaccacaaacgtcttgtgct

SEQ ID NO: 7221 - RNA, 41 nt, synthetic construct
  source 1..41: mol_type = other RNA
atggtgggggcagcgcattagaatctccgtcgtgtgctgtg

SEQ ID NO: 7222 - RNA, 45 nt, synthetic construct
  source 1..45: mol_type = other RNA
tgggggcagcgcctcgccccctccgaaactcatgtgctgtgactg

SEQ ID NO: 7223 - RNA, 45 nt, synthetic construct
  source 1..45: mol_type = other RNA
atggtgggggcagcgcctcgccccctccgaaactcatgtgctgtg

SEQ ID NO: 7224 - RNA, 31 nt, synthetic construct
  source 1..31: mol_type = other RNA
tcatggtgggggcagcgcgtcacaacctccg

SEQ ID NO: 7225 - RNA, 31 nt, synthetic construct
  source 1..31: mol_type = other RNA
gggcagcgcctaccaagctcagtcatgtgct

SEQ ID NO: 7226 - RNA, 31 nt, synthetic construct
  source 1..31: mol_type = other RNA
tcatgctgggggcagcacctcacaacctccg

SEQ ID NO: 7227 - RNA, 28 nt, synthetic construct
  source 1..28: mol_type = other RNA
cgctcgtggtgggacggccgcctaacct

SEQ ID NO: 7228 - RNA, 31 nt, synthetic construct
  source 1..31: mol_type = other RNA
tcatggtgggggcggcgcctaccaacctccg

SEQ ID NO: 7229 - RNA, 42 nt, synthetic construct
  source 1..42: mol_type = other RNA
tgggggcagcgcctaccaacttttgtctgtgtgctgtgactg

SEQ ID NO: 7230 - RNA, 32 nt, synthetic construct
  source 1..32: mol_type = other RNA
gggcagcgcctaccaacttttgtctgtgtgct

SEQ ID NO: 7231 - RNA, 32 nt, synthetic construct
  source 1..32: mol_type = other RNA
tcatggtagggggagcgcctcactaacctccg

SEQ ID NO: 7232 - RNA, 31 nt, synthetic construct
  source 1..31: mol_type = other RNA
tggtgggggcagcgcctcccgatcaccgtca

SEQ ID NO: 7233 - RNA, 41 nt, synthetic construct
  source 1..41: mol_type = other RNA
tgggggcagcgcattacccaatctgtaatgtgctgtgactg

SEQ ID NO: 7234 - RNA, 31 nt, synthetic construct
  source 1..31: mol_type = other RNA
gggcagcgcctcagaacctccgtcatgtgct

SEQ ID NO: 7235 - RNA, 41 nt, synthetic construct
  source 1..41: mol_type = other RNA
atggtgggggcaacgcctcacaacctgattcatgtgctgtg

SEQ ID NO: 7236 - RNA, 31 nt, synthetic construct
  source 1..31: mol_type = other RNA
gggcaacgcctcacaacctgattcatgtgct

SEQ ID NO: 7237 - RNA, 31 nt, synthetic construct
  source 1..31: mol_type = other RNA
tcatggtgggggcagcgccgtacaacctccg

SEQ ID NO: 7238 - RNA, 31 nt, synthetic construct
  source 1..31: mol_type = other RNA
tggtgggggaagcaccccacaaacttcgtca

SEQ ID NO: 7239 - RNA, 31 nt, synthetic construct
  source 1..31: mol_type = other RNA
tggtgggggcagcgcctcgccacctccgtca

SEQ ID NO: 7240 - RNA, 31 nt, synthetic construct
  source 1..31: mol_type = other RNA
gggcagcgcctcgccacctccgtcatgtgct

SEQ ID NO: 7241 - RNA, 32 nt, synthetic construct
  source 1..32: mol_type = other RNA
cgctcctggtggggagcagcaaatcgcaacct

SEQ ID NO: 7242 - RNA, 30 nt, synthetic construct
  source 1..30: mol_type = other RNA
tggtgggcgcagcctcactaacgtccgtca

SEQ ID NO: 7243 - RNA, 38 nt, synthetic construct
  source 1..38: mol_type = other RNA
tgagcagcgctcatggaggcgcagcctcacaacctccg

SEQ ID NO: 7244 - RNA, 28 nt, synthetic construct
  source 1..28: mol_type = other RNA
cgctcatggaggcgcagcctcacaacct

SEQ ID NO: 7245 - RNA, 24 nt, synthetic construct
  source 1..24: mol_type = other RNA
gagcatggtgggggcagcgcctca

SEQ ID NO: 7246 - RNA, 30 nt, synthetic construct
  source 1..30: mol_type = other RNA
cgctctggtgggggcagcgcatcacaacct

SEQ ID NO: 7247 - RNA, 42 nt, synthetic construct
  source 1..42: mol_type = other RNA
gcgctcatggtgggggcatcaccttacaacactccgtcatgt

SEQ ID NO: 7248 - RNA, 31 nt, synthetic construct
  source 1..31: mol_type = other RNA
tggtgggggcagcgcatcacggcttccgtca

SEQ ID NO: 7249 - RNA, 31 nt, synthetic construct
  source 1..31: mol_type = other RNA
tcatggcggaggccgcgccttagaacctccg

SEQ ID NO: 7250 - RNA, 29 nt, synthetic construct
  source 1..29: mol_type = other RNA
tcatgcggggcagcacctcacaacctccg

SEQ ID NO: 7251 - RNA, 48 nt, synthetic construct
  source 1..48: mol_type = other RNA
tgggggcagcgcctcgctacctccgtccaaccaactgtgctgtgactg

SEQ ID NO: 7252 - RNA, 31 nt, synthetic construct
  source 1..31: mol_type = other RNA
tcatggtgggcgaagcgccccacaatctccg

SEQ ID NO: 7253 - RNA, 30 nt, synthetic construct
  source 1..30: mol_type = other RNA
tggtgaggcagcgcctcacaacctccgtca

SEQ ID NO: 7254 - RNA, 31 nt, synthetic construct
  source 1..31: mol_type = other RNA
tggtgtgggcagcacctcccaactgccgtca

SEQ ID NO: 7255 - RNA, 32 nt, synthetic construct
  source 1..32: mol_type = other RNA
gagcagcgctcatggtataggacaagccctca

SEQ ID NO: 7256 - RNA, 31 nt, synthetic construct
  source 1..31: mol_type = other RNA
gggcagcacctcacaacctccgtcctgtgct

SEQ ID NO: 7257 - RNA, 31 nt, synthetic construct
  source 1..31: mol_type = other RNA
tggtgggggcagcgcaccccaacctccgtca

SEQ ID NO: 7258 - RNA, 31 nt, synthetic construct
  source 1..31: mol_type = other RNA
gggcagcgcctctcaacctccgttatgtgct

SEQ ID NO: 7259 - RNA, 43 nt, synthetic construct
  source 1..43: mol_type = other RNA
tgagcagcgctcatgggtgaacagcagcgcatcacaacctccg

SEQ ID NO: 7260 - RNA, 32 nt, synthetic construct
  source 1..32: mol_type = other RNA
gagcaccgctcgatggcggcggctgcgcctca

SEQ ID NO: 7261 - RNA, 41 nt, synthetic construct
  source 1..41: mol_type = other RNA
atggtgggggcagcccctcacaacctccgtcatgtgctgtg

SEQ ID NO: 7262 - RNA, 31 nt, synthetic construct
  source 1..31: mol_type = other RNA
tggtggcggcagcccctcacaacctccgtca

SEQ ID NO: 7263 - RNA, 31 nt, synthetic construct
  source 1..31: mol_type = other RNA
gagcagagctgctggaaggggcagcacctca

SEQ ID NO: 7264 - RNA, 40 nt, synthetic construct
  source 1..40: mol_type = other RNA
tgggggcacgcctcacaacatccgtcatgagctgtgactg

SEQ ID NO: 7265 - RNA, 41 nt, synthetic construct
  source 1..41: mol_type = other RNA
tgggggcagcgccccacgacttccgtcatgtgatgtgactg

SEQ ID NO: 7266 - RNA, 31 nt, synthetic construct
  source 1..31: mol_type = other RNA
gggcagcgcatcaacacctctgtcatgtgct

SEQ ID NO: 7267 - RNA, 42 nt, synthetic construct
  source 1..42: mol_type = other RNA
atggtgggggcagcgccttacaaaactccaacatgtgctgtg

SEQ ID NO: 7268 - RNA, 35 nt, synthetic construct
  source 1..35: mol_type = other RNA
tcatggttggggcagcacctctctaacaacctccg

SEQ ID NO: 7269 - RNA, 43 nt, synthetic construct
  source 1..43: mol_type = other RNA
tgggggcagcgcttccacgacctccgtgaatgtgctgtgactg

SEQ ID NO: 7270 - RNA, 31 nt, synthetic construct
  source 1..31: mol_type = other RNA
tcatggtgggggcagcgccttagactctccg

SEQ ID NO: 7271 - RNA, 49 nt, synthetic construct
  source 1..49: mol_type = other RNA
gctatctgagcagcagtctctcattcatggtgggggcatcgcctcacaa

SEQ ID NO: 7272 - RNA, 39 nt, synthetic construct
  source 1..39: mol_type = other RNA
gagcagcagtctctcattcatggtgggggcatcgcctca

SEQ ID NO: 7273 - RNA, 31 nt, synthetic construct
  source 1..31: mol_type = other RNA
gggcagcgcctcaccaccgccttcatgtgct

SEQ ID NO: 7274 - RNA, 31 nt, synthetic construct
  source 1..31: mol_type = other RNA
tcatggtggtggcagcgcctcacaccctccg

SEQ ID NO: 7275 - RNA, 42 nt, synthetic construct
  source 1..42: mol_type = other RNA
gctatctgaaacagctaccatggtggggggcgcacctcacaa

SEQ ID NO: 7276 - RNA, 31 nt, synthetic construct
  source 1..31: mol_type = other RNA
gggcagcacctcacgacctccgtcatgtgct

SEQ ID NO: 7277 - RNA, 29 nt, synthetic construct
  source 1..29: mol_type = other RNA
tcatgtgggggcagcacctcgcaactccg

SEQ ID NO: 7278 - RNA, 40 nt, synthetic construct
  source 1..40: mol_type = other RNA
tgagcagcgctcctatgggggcagcacctcgcaacctccg

SEQ ID NO: 7279 - RNA, 41 nt, synthetic construct
  source 1..41: mol_type = other RNA
atggtgggggcagcgccttacaacctgcgtcacgtgctgtg

SEQ ID NO: 7280 - RNA, 31 nt, synthetic construct
  source 1..31: mol_type = other RNA
gagcagcgctaccagtgggggcggcacctca

SEQ ID NO: 7281 - RNA, 31 nt, synthetic construct
  source 1..31: mol_type = other RNA
tggtgggcgcagcacctcccatcctccgtca

SEQ ID NO: 7282 - RNA, 31 nt, synthetic construct
  source 1..31: mol_type = other RNA
tcatggtgggggcagcgcctcgcgggctccg

SEQ ID NO: 7283 - RNA, 41 nt, synthetic construct
  source 1..41: mol_type = other RNA
atggtgggggcagcgcctcgcgggctcagtcatgtgctgtg

SEQ ID NO: 7284 - RNA, 31 nt, synthetic construct
  source 1..31: mol_type = other RNA
tggtgggggccgcgcctcacaaactccgtca

SEQ ID NO: 7285 - RNA, 31 nt, synthetic construct
  source 1..31: mol_type = other RNA
tggtgggggcagcgcctcacaactcacgtca

SEQ ID NO: 7286 - RNA, 48 nt, synthetic construct
  source 1..48: mol_type = other RNA
gggcagcgtcaggcacctgtaactctagctacaatgtggtcgggtgct

SEQ ID NO: 7287 - RNA, 31 nt, synthetic construct
  source 1..31: mol_type = other RNA
tggtgggggcagcgcctctaaatcttcgtca

SEQ ID NO: 7288 - RNA, 31 nt, synthetic construct
  source 1..31: mol_type = other RNA
gggcagcgccacgcaatttccgacatgtgct

SEQ ID NO: 7289 - RNA, 43 nt, synthetic construct
  source 1..43: mol_type = other RNA
tgggggcagcgcctcgcaaccacaaacgtcttgtctgtgactg

SEQ ID NO: 7290 - RNA, 35 nt, synthetic construct
  source 1..35: mol_type = other RNA
gggcagcgcctcgccccctccgaaactcatgtgct

SEQ ID NO: 7291 - RNA, 31 nt, synthetic construct
  source 1..31: mol_type = other RNA
tggtgggggcggcgcctcatcacctccgtca

SEQ ID NO: 7292 - RNA, 31 nt, synthetic construct
  source 1..31: mol_type = other RNA
tcatggtgagggcagcacctcacaacctccg

SEQ ID NO: 7293 - RNA, 30 nt, synthetic construct
  source 1..30: mol_type = other RNA
gggcagcgccacacaacctccgtcagtgct

SEQ ID NO: 7294 - RNA, 31 nt, synthetic construct
  source 1..31: mol_type = other RNA
tggtgggggcagcacctcacaacctccgtca

SEQ ID NO: 7295 - RNA, 31 nt, synthetic construct
  source 1..31: mol_type = other RNA
tggtgagggcagcgcatcacaacctccgtca

SEQ ID NO: 7296 - RNA, 39 nt, synthetic construct
  source 1..39: mol_type = other RNA
gctatctgagcagttcgtggtgggacggccgcctcacaa

SEQ ID NO: 7297 - RNA, 39 nt, synthetic construct
  source 1..39: mol_type = other RNA
atggtgggggccgcctgatctgggtcctcatgtgctgtg

SEQ ID NO: 7298 - RNA, 29 nt, synthetic construct
  source 1..29: mol_type = other RNA
gagcagttcgtggtgggacggccgcctca

SEQ ID NO: 7299 - RNA, 36 nt, synthetic construct
  source 1..36: mol_type = other RNA
tgagcagctcgtggtgggacggccgcctaacctccg

SEQ ID NO: 7300 - RNA, 41 nt, synthetic construct
  source 1..41: mol_type = other RNA
tgagcagccatcatggtgggcgcagcgcctcaaaacctccg

SEQ ID NO: 7301 - RNA, 31 nt, synthetic construct
  source 1..31: mol_type = other RNA
tggtgggggcggcgcctaccaactttcgtca

SEQ ID NO: 7302 - RNA, 40 nt, synthetic construct
  source 1..40: mol_type = other RNA
tgggggcacccctcacaatctccgcatcgtgctgtgactg

SEQ ID NO: 7303 - RNA, 31 nt, synthetic construct
  source 1..31: mol_type = other RNA
tggtgggggcagcgcctcccccactacgtca

SEQ ID NO: 7304 - RNA, 31 nt, synthetic construct
  source 1..31: mol_type = other RNA
tcatgatgggggcaacgcctcacaacctccg

SEQ ID NO: 7305 - RNA, 36 nt, synthetic construct
  source 1..36: mol_type = other RNA
tggtgggggcggcgccccacaacacccactccgtca

SEQ ID NO: 7306 - RNA, 50 nt, synthetic construct
  source 1..50: mol_type = other RNA
tgggggcagcgcctcaccacctccgaaaaaaaaatcatgtgctgtgactg

SEQ ID NO: 7307 - RNA, 40 nt, synthetic construct
  source 1..40: mol_type = other RNA
gggcagcgcctcaccacctccgaaaaaaaaatcatgtgct

SEQ ID NO: 7308 - RNA, 31 nt, synthetic construct
  source 1..31: mol_type = other RNA
tcatggtgggggcagcgcctcgccacctccg

SEQ ID NO: 7309 - RNA, 31 nt, synthetic construct
  source 1..31: mol_type = other RNA
gggcagcgctccacaacctccgtcatgtgct

SEQ ID NO: 7310 - RNA, 42 nt, synthetic construct
  source 1..42: mol_type = other RNA
atggtggggtgcagcgcctcacaaactccgctatgtgctgtg

SEQ ID NO: 7311 - RNA, 42 nt, synthetic construct
  source 1..42: mol_type = other RNA
gcgctcatggtggggagcagcaaatcgcgggctccgtcatgt

SEQ ID NO: 7312 - RNA, 41 nt, synthetic construct
  source 1..41: mol_type = other RNA
tgggggcagcaactcaccacctccgtcatgcgctgtgactg

SEQ ID NO: 7313 - RNA, 36 nt, synthetic construct
  source 1..36: mol_type = other RNA
tgagcagctggtgggggcagcgcatcacaacctccg

SEQ ID NO: 7314 - RNA, 31 nt, synthetic construct
  source 1..31: mol_type = other RNA
tggtggaggccgcgccttagaacctccgtca

SEQ ID NO: 7315 - RNA, 31 nt, synthetic construct
  source 1..31: mol_type = other RNA
gggcagcgccttagaacctccgtcatgtgct

SEQ ID NO: 7316 - RNA, 30 nt, synthetic construct
  source 1..30: mol_type = other RNA
tcatggtgaggcagcgcctcacaacctccg

SEQ ID NO: 7317 - RNA, 43 nt, synthetic construct
  source 1..43: mol_type = other RNA
tgagcagcgaggaatggtgggggcagcgcctcaacaacctccg

SEQ ID NO: 7318 - RNA, 31 nt, synthetic construct
  source 1..31: mol_type = other RNA
gggcagcgcctcataacctctgtcaagtgct

SEQ ID NO: 7319 - RNA, 29 nt, synthetic construct
  source 1..29: mol_type = other RNA
gggcagcgcctcacttcccgtcatgtgct

SEQ ID NO: 7320 - RNA, 42 nt, synthetic construct
  source 1..42: mol_type = other RNA
gctatctgagcagcgctcatggtataggacaagccctcacaa

SEQ ID NO: 7321 - RNA, 39 nt, synthetic construct
  source 1..39: mol_type = other RNA
tgggggcagcctcaaaacctccgtgaggtgctgtgactg

SEQ ID NO: 7322 - RNA, 31 nt, synthetic construct
  source 1..31: mol_type = other RNA
gggcagcacctcccaccctccgccctgtgct

SEQ ID NO: 7323 - RNA, 41 nt, synthetic construct
  source 1..41: mol_type = other RNA
tgggggcagcacctcacaacctccgtcctattatgtgactg

SEQ ID NO: 7324 - RNA, 41 nt, synthetic construct
  source 1..41: mol_type = other RNA
tgggggcagcgcaccccaacctccgtcatgtgctgtgactg

SEQ ID NO: 7325 - RNA, 31 nt, synthetic construct
  source 1..31: mol_type = other RNA
gggcagcgcaccccaacctccgtcatgtgct

SEQ ID NO: 7326 - RNA, 30 nt, synthetic construct
  source 1..30: mol_type = other RNA
gagcaccgctcatggtagggtagcacctca

SEQ ID NO: 7327 - RNA, 32 nt, synthetic construct
  source 1..32: mol_type = other RNA
tcatggtgaacagcagcgcatcaccccctccg

SEQ ID NO: 7328 - RNA, 42 nt, synthetic construct
  source 1..42: mol_type = other RNA
atggtgggcagcagcgcatcaccccctacgtcatgtgctgtg

SEQ ID NO: 7329 - RNA, 32 nt, synthetic construct
  source 1..32: mol_type = other RNA
tggtgaacagcagcgcatcaccccctacgtca

SEQ ID NO: 7330 - RNA, 41 nt, synthetic construct
  source 1..41: mol_type = other RNA
tgggggcagcgcctctcaacctccgtcatgtactgtgactg

SEQ ID NO: 7331 - RNA, 31 nt, synthetic construct
  source 1..31: mol_type = other RNA
tggtggcggctgcgcctctcaacctccgtca

SEQ ID NO: 7332 - RNA, 41 nt, synthetic construct
  source 1..41: mol_type = other RNA
tgggggcagcccctcacaacctccgtcatgtaatgtgactg

SEQ ID NO: 7333 - RNA, 31 nt, synthetic construct
  source 1..31: mol_type = other RNA
gggcagcaactcgcaaactctgtcatgtgct

SEQ ID NO: 7334 - RNA, 41 nt, synthetic construct
  source 1..41: mol_type = other RNA
tgggggcagcgcctcaccacctccgtcatgttctgtgactg

SEQ ID NO: 7335 - RNA, 42 nt, synthetic construct
  source 1..42: mol_type = other RNA
atggtggggagcagcgcatcaacacctctgtcatgtgctgtg

SEQ ID NO: 7336 - RNA, 41 nt, synthetic construct
  source 1..41: mol_type = other RNA
atggtgggcgcagcgcctcaaagtccccgtaatgtgctgtg

SEQ ID NO: 7337 - RNA, 31 nt, synthetic construct
  source 1..31: mol_type = other RNA
tggtgggcgcagcgcctcaaagtccccgtca

SEQ ID NO: 7338 - RNA, 31 nt, synthetic construct
  source 1..31: mol_type = other RNA
gggcagcgcctcaaagtccccgtaatgtgct

SEQ ID NO: 7339 - RNA, 33 nt, synthetic construct
  source 1..33: mol_type = other RNA
tggtggggcagcaaactcagggtagcttcgtca

SEQ ID NO: 7340 - RNA, 34 nt, synthetic construct
  source 1..34: mol_type = other RNA
gggcagcaaactcagggtagcttcgtcatgtgct

SEQ ID NO: 7341 - RNA, 31 nt, synthetic construct
  source 1..31: mol_type = other RNA
tcatggtgggggcatcgcctcacaacctccg

SEQ ID NO: 7342 - RNA, 31 nt, synthetic construct
  source 1..31: mol_type = other RNA
gggcatcgcctcacaacctacgtcatgtgct

SEQ ID NO: 7343 - RNA, 49 nt, synthetic construct
  source 1..49: mol_type = other RNA
tgagcagcagtctctcattcatggtgggggcatcgcctcacaacctccg

SEQ ID NO: 7344 - RNA, 31 nt, synthetic construct
  source 1..31: mol_type = other RNA
gagcagagcttatggtgggggcagcacctca

SEQ ID NO: 7345 - RNA, 29 nt, synthetic construct
  source 1..29: mol_type = other RNA
gggcagcacctcgcaattcgtcatgtgct

SEQ ID NO: 7346 - RNA, 31 nt, synthetic construct
  source 1..31: mol_type = other RNA
tcatggtgggggcagcacctcacaaactccg

SEQ ID NO: 7347 - RNA, 38 nt, synthetic construct
  source 1..38: mol_type = other RNA
tgggggcagcgccttacaacctgcgtcacctgtgactg

SEQ ID NO: 7348 - RNA, 41 nt, synthetic construct
  source 1..41: mol_type = other RNA
tgagcagcgctaccagtgggggcggcacctcacaacctccg

SEQ ID NO: 7349 - RNA, 31 nt, synthetic construct
  source 1..31: mol_type = other RNA
tggtgggggcagcgcctcgcgggctccgtca

SEQ ID NO: 7350 - RNA, 40 nt, synthetic construct
  source 1..40: mol_type = other RNA
tgagcagcgttcatgtgggggcagcacctcgcaacctccg

SEQ ID NO: 7351 - RNA, 59 nt, synthetic construct
  source 1..59: mol_type = other RNA
gcgctcatggtgggtgaagcttctccgcccatttttaactcctcgttcatccgtcatgt

SEQ ID NO: 7352 - RNA, 50 nt, synthetic construct
  source 1..50: mol_type = other RNA
cgctcatggtgggtgaagcttctccgcccatttttaactcctcgtaacct

SEQ ID NO: 7353 - RNA, 31 nt, synthetic construct
  source 1..31: mol_type = other RNA
tggtgggggcagcgcctaccgcaatccgtca

SEQ ID NO: 7354 - RNA, 41 nt, synthetic construct
  source 1..41: mol_type = other RNA
atggtgggggcaacgcctcaagacctaccgcatgtgctgtg

SEQ ID NO: 7355 - RNA, 31 nt, synthetic construct
  source 1..31: mol_type = other RNA
cgctcatggtgggggcaacgcctcaaaacct

SEQ ID NO: 7356 - RNA, 41 nt, synthetic construct
  source 1..41: mol_type = other RNA
atggtgggggcagcacctcacaaaataccagatgtgctgtg

SEQ ID NO: 7357 - RNA, 39 nt, synthetic construct
  source 1..39: mol_type = other RNA
tgggggcagcgactcacaacccgtcgcatgctgtgactg

SEQ ID NO: 7358 - RNA, 41 nt, synthetic construct
  source 1..41: mol_type = other RNA
atggtgggggcagcgcctcacaactcataacatgtgctgtg

SEQ ID NO: 7359 - RNA, 41 nt, synthetic construct
  source 1..41: mol_type = other RNA
atggtgggggcagcgcctctaaatcttcgcaatgtgctgtg

SEQ ID NO: 7360 - RNA, 31 nt, synthetic construct
  source 1..31: mol_type = other RNA
gggcagcgcattagaatctccgtcgtgtgct

SEQ ID NO: 7361 - RNA, 31 nt, synthetic construct
  source 1..31: mol_type = other RNA
gggcagcgcctcacaacctccgtcatgtgct

SEQ ID NO: 7362 - RNA, 34 nt, synthetic construct
  source 1..34: mol_type = other RNA
gagcagggctcatggtggggacaacaacgcctca

SEQ ID NO: 7363 - RNA, 31 nt, synthetic construct
  source 1..31: mol_type = other RNA
tcatgggtggggcagcgcatcacagtctccg

SEQ ID NO: 7364 - RNA, 38 nt, synthetic construct
  source 1..38: mol_type = other RNA
gcgctcatggtgggacggccgcctgatctgcgtcatgt

SEQ ID NO: 7365 - RNA, 42 nt, synthetic construct
  source 1..42: mol_type = other RNA
atggtgggggcggcgcctaccaacttttgtctgtgtgctgtg

SEQ ID NO: 7366 - RNA, 30 nt, synthetic construct
  source 1..30: mol_type = other RNA
gagcaggctcctggtgggggcggcgcctca

SEQ ID NO: 7367 - RNA, 31 nt, synthetic construct
  source 1..31: mol_type = other RNA
gggcagcgcctcataacctccgtcatgtgct

SEQ ID NO: 7368 - RNA, 41 nt, synthetic construct
  source 1..41: mol_type = other RNA
atggtggggggagcgcctcactaacctccgtccgtgctgtg

SEQ ID NO: 7369 - RNA, 32 nt, synthetic construct
  source 1..32: mol_type = other RNA
tggtggggggagcgcctcactaacctccgtca

SEQ ID NO: 7370 - RNA, 31 nt, synthetic construct
  source 1..31: mol_type = other RNA
gggcagcgcattacccaatctgtaatgtgct

SEQ ID NO: 7371 - RNA, 41 nt, synthetic construct
  source 1..41: mol_type = other RNA
tgggggcagcgcctcagaacctccgtcatgtgctgtgactg

SEQ ID NO: 7372 - RNA, 31 nt, synthetic construct
  source 1..31: mol_type = other RNA
gggcagcgactcacacccccacccatgtgct

SEQ ID NO: 7373 - RNA, 28 nt, synthetic construct
  source 1..28: mol_type = other RNA
gggcagcgcctctacaaccatcagtgct

SEQ ID NO: 7374 - RNA, 31 nt, synthetic construct
  source 1..31: mol_type = other RNA
gggcagcgcctcacaacctcagtcgtgtgct

SEQ ID NO: 7375 - RNA, 41 nt, synthetic construct
  source 1..41: mol_type = other RNA
tgggggcaacgcctcacaacctgattcatctaatgtgactg

SEQ ID NO: 7376 - RNA, 31 nt, synthetic construct
  source 1..31: mol_type = other RNA
gggcagcgccgtacaacctccgtcatgtgct

SEQ ID NO: 7377 - RNA, 31 nt, synthetic construct
  source 1..31: mol_type = other RNA
gggcagcgcctcacaacctccgtcacgtgct

SEQ ID NO: 7378 - RNA, 32 nt, synthetic construct
  source 1..32: mol_type = other RNA
tggtgatgtgcagcgcctcacaaactccgtca

SEQ ID NO: 7379 - RNA, 31 nt, synthetic construct
  source 1..31: mol_type = other RNA
gggcagcgcctcacaaactccgctatgtgct

SEQ ID NO: 7380 - RNA, 30 nt, synthetic construct
  source 1..30: mol_type = other RNA
gggcagcaaatcgcgggctcgtcatgtgct

SEQ ID NO: 7381 - RNA, 39 nt, synthetic construct
  source 1..39: mol_type = other RNA
gcgctcatggaggcgcagcctcactaacgtccgtcatgt

SEQ ID NO: 7382 - RNA, 29 nt, synthetic construct
  source 1..29: mol_type = other RNA
gagcagcgctcatggaggcgcagccctca

SEQ ID NO: 7383 - RNA, 31 nt, synthetic construct
  source 1..31: mol_type = other RNA
tcatggtgggggcagcgcatcacaccctccg

SEQ ID NO: 7384 - RNA, 30 nt, synthetic construct
  source 1..30: mol_type = other RNA
gctatctgtggtgggggcagcgcctcacaa

SEQ ID NO: 7385 - RNA, 41 nt, synthetic construct
  source 1..41: mol_type = other RNA
tgggggcagcgcatcacggcttccgtcatgtcatgtgactg

SEQ ID NO: 7386 - RNA, 41 nt, synthetic construct
  source 1..41: mol_type = other RNA
atggtgggggcagcgcatcacggcttccgtcatgtgctgtg

SEQ ID NO: 7387 - RNA, 47 nt, synthetic construct
  source 1..47: mol_type = other RNA
atggtgggggcagcgcctccttgtcacaaccgccgtcaggtgctgtg

SEQ ID NO: 7388 - RNA, 37 nt, synthetic construct
  source 1..37: mol_type = other RNA
tggtgagggcagcgcctccttgtcacaaccgccgtca

SEQ ID NO: 7389 - RNA, 31 nt, synthetic construct
  source 1..31: mol_type = other RNA
tggtgggcgaagcgccccacaatgtccgtca

SEQ ID NO: 7390 - RNA, 31 nt, synthetic construct
  source 1..31: mol_type = other RNA
cgctcgttgtgggcgaagcgccccacaacct

SEQ ID NO: 7391 - RNA, 32 nt, synthetic construct
  source 1..32: mol_type = other RNA
gagcagcgaggaatggtgggggcagcgcctca

SEQ ID NO: 7392 - RNA, 31 nt, synthetic construct
  source 1..31: mol_type = other RNA
tcatggtgtgggcagcacctcccaacctccg

SEQ ID NO: 7393 - RNA, 41 nt, synthetic construct
  source 1..41: mol_type = other RNA
atggtgggggcaacgccttataacctccgtcatgtgctgtg

SEQ ID NO: 7394 - RNA, 31 nt, synthetic construct
  source 1..31: mol_type = other RNA
tggtgggggcaacacctggcaacctccgtca

SEQ ID NO: 7395 - RNA, 31 nt, synthetic construct
  source 1..31: mol_type = other RNA
gggcaacacctggcaacctctgtcatgtgct

SEQ ID NO: 7396 - RNA, 41 nt, synthetic construct
  source 1..41: mol_type = other RNA
gcgctcatggtataggacaagcctcaaaacctccgtcatgt

SEQ ID NO: 7397 - RNA, 41 nt, synthetic construct
  source 1..41: mol_type = other RNA
atggtgggggacaagcctcaaaacctccgtgaggtgctgtg

SEQ ID NO: 7398 - RNA, 41 nt, synthetic construct
  source 1..41: mol_type = other RNA
tgagcagcgctcatggtataggacaagcctcaaaacctccg

SEQ ID NO: 7399 - RNA, 31 nt, synthetic construct
  source 1..31: mol_type = other RNA
tcatggtggacgcagcacctcccaccctccg

SEQ ID NO: 7400 - RNA, 31 nt, synthetic construct
  source 1..31: mol_type = other RNA
tggtgggggcggcacctcacaacctccgtca

SEQ ID NO: 7401 - RNA, 41 nt, synthetic construct
  source 1..41: mol_type = other RNA
tgggggcagcgcctctcaacctccgttatgtactgtgactg

SEQ ID NO: 7402 - RNA, 31 nt, synthetic construct
  source 1..31: mol_type = other RNA
tcatggcggcggctgcgcctctcaacctccg

SEQ ID NO: 7403 - RNA, 31 nt, synthetic construct
  source 1..31: mol_type = other RNA
gggcagcccctcacaacctccgtcatgtgct

SEQ ID NO: 7404 - RNA, 31 nt, synthetic construct
  source 1..31: mol_type = other RNA
tggtgggggcagcaactcgcaaactccgtca

SEQ ID NO: 7405 - RNA, 31 nt, synthetic construct
  source 1..31: mol_type = other RNA
cgctcctggaaggggcagcaactcgcaacct

SEQ ID NO: 7406 - RNA, 42 nt, synthetic construct
  source 1..42: mol_type = other RNA
atggtgggggccacacctccatcacatctgtaatgtgctgtg

SEQ ID NO: 7407 - RNA, 32 nt, synthetic construct
  source 1..32: mol_type = other RNA
gggcaacacctccatcacatctgtaatgtgct

SEQ ID NO: 7408 - RNA, 41 nt, synthetic construct
  source 1..41: mol_type = other RNA
atggtgggggcagcgcctcacgatttccgtaatgtgctgtg

SEQ ID NO: 7409 - RNA, 31 nt, synthetic construct
  source 1..31: mol_type = other RNA
gggcagcgccccacgacttccgtcatgtgct

SEQ ID NO: 7410 - RNA, 32 nt, synthetic construct
  source 1..32: mol_type = other RNA
tcatggtggagagcagcgcatcaacacctccg

SEQ ID NO: 7411 - RNA, 31 nt, synthetic construct
  source 1..31: mol_type = other RNA
tcatggtggcggccgcgcatcacagtctccg

SEQ ID NO: 7412 - RNA, 31 nt, synthetic construct
  source 1..31: mol_type = other RNA
tggtggcggccgcgcatcacagtcaccgtca

SEQ ID NO: 7413 - RNA, 31 nt, synthetic construct
  source 1..31: mol_type = other RNA
gggcagcgcatcacagtcaccgtcatgtgct

SEQ ID NO: 7414 - RNA, 31 nt, synthetic construct
  source 1..31: mol_type = other RNA
gagcaacgccaatggtggtggcagcacctca

SEQ ID NO: 7415 - RNA, 39 nt, synthetic construct
  source 1..39: mol_type = other RNA
tgggggcagcacttccaaacctgcgttgtgctgtgactg

SEQ ID NO: 7416 - RNA, 41 nt, synthetic construct
  source 1..41: mol_type = other RNA
tgggggcagcgcctaagagtctacgtcatggtctgtgactg

SEQ ID NO: 7417 - RNA, 31 nt, synthetic construct
  source 1..31: mol_type = other RNA
gagcagctctctccgggggggcagcgcctca

SEQ ID NO: 7418 - RNA, 32 nt, synthetic construct
  source 1..32: mol_type = other RNA
tggtgggggcagcgcttccacgacctccgtca

SEQ ID NO: 7419 - RNA, 43 nt, synthetic construct
  source 1..43: mol_type = other RNA
gctatctgagcggtctgcgcacttatggggcagcacctcacaa

SEQ ID NO: 7420 - RNA, 31 nt, synthetic construct
  source 1..31: mol_type = other RNA
tggtgggggcatcgcctcacaacctacgtca

SEQ ID NO: 7421 - RNA, 31 nt, synthetic construct
  source 1..31: mol_type = other RNA
gggcagcgcctcacacctcacgttatgtgct

SEQ ID NO: 7422 - RNA, 31 nt, synthetic construct
  source 1..31: mol_type = other RNA
gggcagcgcctcacacactgacttaggtgct

SEQ ID NO: 7423 - RNA, 30 nt, synthetic construct
  source 1..30: mol_type = other RNA
cgctcctatgggggcagcacctcgcaacct

SEQ ID NO: 7424 - RNA, 31 nt, synthetic construct
  source 1..31: mol_type = other RNA
tggtgggggcagcgccttacaacctgcgtca

SEQ ID NO: 7425 - RNA, 31 nt, synthetic construct
  source 1..31: mol_type = other RNA
gggcagcgccttacaacctgcgtcacgtgct

SEQ ID NO: 7426 - RNA, 30 nt, synthetic construct
  source 1..30: mol_type = other RNA
cgctcatgtgggggcagcacctcgcaacct

SEQ ID NO: 7427 - RNA, 32 nt, synthetic construct
  source 1..32: mol_type = other RNA
tggtgggggcagcaccttacaattctccgtca

SEQ ID NO: 7428 - RNA, 31 nt, synthetic construct
  source 1..31: mol_type = other RNA
gggcagcaccttacaattctccccatgtgct

SEQ ID NO: 7429 - RNA, 48 nt, synthetic construct
  source 1..48: mol_type = other RNA
gctatctgagcaggcgctcatggtgggtgaagcttctccgcctcacaa

SEQ ID NO: 7430 - RNA, 31 nt, synthetic construct
  source 1..31: mol_type = other RNA
tggtgggggcagcgcctcccaaccgccgtca

SEQ ID NO: 7431 - RNA, 31 nt, synthetic construct
  source 1..31: mol_type = other RNA
gggcagcacctcacaaaataccagatgtgct

SEQ ID NO: 7432 - RNA, 29 nt, synthetic construct
  source 1..29: mol_type = other RNA
gggcagcgactcacaacccgtcgcgtgct

SEQ ID NO: 7433 - RNA, 31 nt, synthetic construct
  source 1..31: mol_type = other RNA
gggcagcgcctcacaaactccgtcatgtgct

SEQ ID NO: 7434 - RNA, 31 nt, synthetic construct
  source 1..31: mol_type = other RNA
gggcagcgcctcacaactcataacatgtgct

SEQ ID NO: 7435 - RNA, 32 nt, synthetic construct
  source 1..32: mol_type = other RNA
gggcagcgccttacaaatcaaacacatgtgct

SEQ ID NO: 7436 - RNA, 54 nt, synthetic construct
  source 1..54: mol_type = other RNA
gagcagcgttcatggtggtgcgagcaattatcctgccggcggatagccgcctca

SEQ ID NO: 7437 - RNA, 31 nt, synthetic construct
  source 1..31: mol_type = other RNA
tcatggtgggggcagcgccacgcaatctccg

SEQ ID NO: 7438 - RNA, 31 nt, synthetic construct
  source 1..31: mol_type = other RNA
tggtgggggcagcgcctaacaacctccgtca

SEQ ID NO: 7439 - RNA, 31 nt, synthetic construct
  source 1..31: mol_type = other RNA
gggcagcgcctaacaacctctgtcgtgtgct

SEQ ID NO: 7440 - RNA, 31 nt, synthetic construct
  source 1..31: mol_type = other RNA
tcatggtgggggcagcgcattagaatctccg

SEQ ID NO: 7441 - RNA, 41 nt, synthetic construct
  source 1..41: mol_type = other RNA
tgggggcagcgcctaccaacctacgtcatgtgatgtgactg

SEQ ID NO: 7442 - RNA, 41 nt, synthetic construct
  source 1..41: mol_type = other RNA
atggtgggggcagcgcgtcacaacttccaacatgtgctgtg

SEQ ID NO: 7443 - RNA, 31 nt, synthetic construct
  source 1..31: mol_type = other RNA
gggcagcgcctcccggcctccgtcatgtgct

SEQ ID NO: 7444 - RNA, 34 nt, synthetic construct
  source 1..34: mol_type = other RNA
tcatggtggggacaacaacgcctcacgatctccg

SEQ ID NO: 7445 - RNA, 40 nt, synthetic construct
  source 1..40: mol_type = other RNA
atggtgggggcagcgccacacaacctccgtcagtgctgtg

SEQ ID NO: 7446 - RNA, 31 nt, synthetic construct
  source 1..31: mol_type = other RNA
tcatggtgagggcagcgcatcacaacctccg

SEQ ID NO: 7447 - RNA, 30 nt, synthetic construct
  source 1..30: mol_type = other RNA
gggcagcgcatcacaacctcgacatgtgct

SEQ ID NO: 7448 - RNA, 31 nt, synthetic construct
  source 1..31: mol_type = other RNA
gggcagcgcctcactaacctccgtccgtgct

SEQ ID NO: 7449 - RNA, 31 nt, synthetic construct
  source 1..31: mol_type = other RNA
tggtggggggagcgcctcacaacctccgtca

SEQ ID NO: 7450 - RNA, 31 nt, synthetic construct
  source 1..31: mol_type = other RNA
tggtgggggcagcgccgtacaacctccgtca

SEQ ID NO: 7451 - RNA, 31 nt, synthetic construct
  source 1..31: mol_type = other RNA
tcatggtgggggaagcaccccacaaactccg

SEQ ID NO: 7452 - RNA, 41 nt, synthetic construct
  source 1..41: mol_type = other RNA
tgggggcagcgcctcacaaactccgctatgggttgtgactg

SEQ ID NO: 7453 - RNA, 51 nt, synthetic construct
  source 1..51: mol_type = other RNA
tgggggcagcaaatcgcgggctcgtcatgtaaaagaaaagagctgtgactg

SEQ ID NO: 7454 - RNA, 29 nt, synthetic construct
  source 1..29: mol_type = other RNA
tcatggaggcgcagcctcactaacctccg

SEQ ID NO: 7455 - RNA, 49 nt, synthetic construct
  source 1..49: mol_type = other RNA
tgggggcagcctcactaacgtccgtcagaaaaaaaaagtgctgtgactg

SEQ ID NO: 7456 - RNA, 32 nt, synthetic construct
  source 1..32: mol_type = other RNA
tggtgggggcatcaccttacaacactccgtca

SEQ ID NO: 7457 - RNA, 32 nt, synthetic construct
  source 1..32: mol_type = other RNA
gggcatcaccttacaacactccgtcatgtgct

SEQ ID NO: 7458 - RNA, 31 nt, synthetic construct
  source 1..31: mol_type = other RNA
gggcagcgcatcacggcttccgtcatgtgct

SEQ ID NO: 7459 - RNA, 29 nt, synthetic construct
  source 1..29: mol_type = other RNA
gagcagtgcccatgcggggcagcacctca

SEQ ID NO: 7460 - RNA, 36 nt, synthetic construct
  source 1..36: mol_type = other RNA
tgggggcagcgcctcacaacctctgtgctgtgactg

SEQ ID NO: 7461 - RNA, 41 nt, synthetic construct
  source 1..41: mol_type = other RNA
atggtgggggcggcgcctcataacctctgtcaagtgctgtg

SEQ ID NO: 7462 - RNA, 31 nt, synthetic construct
  source 1..31: mol_type = other RNA
gggcaacgccttataacctccgtcatgtgct

SEQ ID NO: 7463 - RNA, 29 nt, synthetic construct
  source 1..29: mol_type = other RNA
gggcagcctcaaaacctccgtgaggtgct

SEQ ID NO: 7464 - RNA, 31 nt, synthetic construct
  source 1..31: mol_type = other RNA
cgctcatggtataggacaagcctcaaaacct

SEQ ID NO: 7465 - RNA, 43 nt, synthetic construct
  source 1..43: mol_type = other RNA
gcgctcatgggtgaacagcagcgcatcaccccctacgtcatgt

SEQ ID NO: 7466 - RNA, 31 nt, synthetic construct
  source 1..31: mol_type = other RNA
gggcagcgcatcaccccctacgtcatgtgct

SEQ ID NO: 7467 - RNA, 31 nt, synthetic construct
  source 1..31: mol_type = other RNA
tcatggtggcggcagcccctcacaacctccg

SEQ ID NO: 7468 - RNA, 31 nt, synthetic construct
  source 1..31: mol_type = other RNA
gggcagcgcctcacgatttccgtaatgtgct

SEQ ID NO: 7469 - RNA, 35 nt, synthetic construct
  source 1..35: mol_type = other RNA
tggtgggggcagcacctctctaacaacctccgtca

SEQ ID NO: 7470 - RNA, 41 nt, synthetic construct
  source 1..41: mol_type = other RNA
tgggggcagcgcctcatccaatccgtcatgagctgtgactg

SEQ ID NO: 7471 - RNA, 42 nt, synthetic construct
  source 1..42: mol_type = other RNA
gcgctcatttggggcagcaaactcagggtagcttcgtcatgt

SEQ ID NO: 7472 - RNA, 44 nt, synthetic construct
  source 1..44: mol_type = other RNA
tgggggcagcaaactcagggtagcttcgtcatgggctgtgactg

SEQ ID NO: 7473 - RNA, 44 nt, synthetic construct
  source 1..44: mol_type = other RNA
gcgctcatggggggggcagcgcctcacaccaacctccgtcatgt

SEQ ID NO: 7474 - RNA, 31 nt, synthetic construct
  source 1..31: mol_type = other RNA
tggtgggggcagcaccttataacttccgtca

SEQ ID NO: 7475 - RNA, 31 nt, synthetic construct
  source 1..31: mol_type = other RNA
tggtgggggcagcgcctcaccaccgccgtca

SEQ ID NO: 7476 - RNA, 41 nt, synthetic construct
  source 1..41: mol_type = other RNA
atggtgggggcagcgcctcacacctcacgttatgtgctgtg

SEQ ID NO: 7477 - RNA, 31 nt, synthetic construct
  source 1..31: mol_type = other RNA
gagcagctaccatggtggggggcgcacctca

SEQ ID NO: 7478 - RNA, 31 nt, synthetic construct
  source 1..31: mol_type = other RNA
tggtgggggcagcgcctcacacactgcgtca

SEQ ID NO: 7479 - RNA, 31 nt, synthetic construct
  source 1..31: mol_type = other RNA
tggtgggggcagcacctcaagatcttcgtca

SEQ ID NO: 7480 - RNA, 43 nt, synthetic construct
  source 1..43: mol_type = other RNA
tgggggcagcgcctcgcgggctcagtcataaatgctgtgactg

SEQ ID NO: 7481 - RNA, 31 nt, synthetic construct
  source 1..31: mol_type = other RNA
tggtgggggcagcacctcgccccctccgtca

SEQ ID NO: 7482 - RNA, 31 nt, synthetic construct
  source 1..31: mol_type = other RNA
tggtgggggccgcgcctcaccgtctccgtca

SEQ ID NO: 7483 - RNA, 50 nt, synthetic construct
  source 1..50: mol_type = other RNA
tcatggtgggtgaagcttctccgcccatttttaactcctcgttcactccg

SEQ ID NO: 7484 - RNA, 38 nt, synthetic construct
  source 1..38: mol_type = other RNA
gagcaggcgctcatggtgggtgaagcttctccgcctca

SEQ ID NO: 7485 - RNA, 49 nt, synthetic construct
  source 1..49: mol_type = other RNA
gggcagcttctccgcccatttttaactcctcgttcatctgacatgtgct

SEQ ID NO: 7486 - RNA, 60 nt, synthetic construct
  source 1..60: mol_type = other RNA
tgagcagcgctcatggtgggtgaagcttctccgcccatttttaactcctcgtaacctccg

SEQ ID NO: 7487 - RNA, 31 nt, synthetic construct
  source 1..31: mol_type = other RNA
gggcaacgcctcaagacctaccgcatgtgct

SEQ ID NO: 7488 - RNA, 32 nt, synthetic construct
  source 1..32: mol_type = other RNA
gagcagacgctcatggtgggggcagcacctca

SEQ ID NO: 7489 - RNA, 32 nt, synthetic construct
  source 1..32: mol_type = other RNA
tggtgggggcagcacctcacaaaataccgtca

SEQ ID NO: 7490 - RNA, 61 nt, synthetic construct
  source 1..61: mol_type = other RNA
tgggggcagcgtcaggcacctgtaactctagctacaatgtggtcggagggtcttgtgactg

SEQ ID NO: 7491 - RNA, 44 nt, synthetic construct
  source 1..44: mol_type = other RNA
tgggggcagcgcctcgcggcctccgtcagagagtgctgtgactg

SEQ ID NO: 7492 - RNA, 33 nt, synthetic construct
  source 1..33: mol_type = other RNA
gggcaacgcctcacaacctgcgtcatgtgtgct

SEQ ID NO: 7493 - RNA, 31 nt, synthetic construct
  source 1..31: mol_type = other RNA
gggcagcgcctcacaacctctgtcaagtgct

SEQ ID NO: 7494 - RNA, 31 nt, synthetic construct
  source 1..31: mol_type = other RNA
tggtgggggcaacgcctcacaacctgcgtca

SEQ ID NO: 7495 - RNA, 31 nt, synthetic construct
  source 1..31: mol_type = other RNA
tggtgggggcagcgcctcacaaactccgtca

SEQ ID NO: 7496 - RNA, 30 nt, synthetic construct
  source 1..30: mol_type = other RNA
gggcagcctcactaacgtccgtcaggtgct

SEQ ID NO: 7497 - RNA, 32 nt, synthetic construct
  source 1..32: mol_type = other RNA
gggcagcgcatcacaccctccgtcaatgtgct

SEQ ID NO: 7498 - RNA, 31 nt, synthetic construct
  source 1..31: mol_type = other RNA
tcatggtgggggcatcaccttacaacctccg

SEQ ID NO: 7499 - RNA, 31 nt, synthetic construct
  source 1..31: mol_type = other RNA
tggtgggggcggcgcctcacaccctccgtca

SEQ ID NO: 7500 - RNA, 41 nt, synthetic construct
  source 1..41: mol_type = other RNA
tgagcagcgctgctggaaggggcagcaactcgcaacctccg

SEQ ID NO: 7501 - RNA, 31 nt, synthetic construct
  source 1..31: mol_type = other RNA
gggcagcgcctaagagtctacgtcatgtgct

SEQ ID NO: 7502 - RNA, 32 nt, synthetic construct
  source 1..32: mol_type = other RNA
tcatggagggggcagcgcttccacgacctccg

SEQ ID NO: 7503 - RNA, 31 nt, synthetic construct
  source 1..31: mol_type = other RNA
gagcagtgcttaccgtgggggcagcgcctca

SEQ ID NO: 7504 - RNA, 43 nt, synthetic construct
  source 1..43: mol_type = other RNA
tgagcagcgcacttatggggcagcaaactcagggtaacctccg

SEQ ID NO: 7505 - RNA, 41 nt, synthetic construct
  source 1..41: mol_type = other RNA
tgggggcagcgcctcaccaccgccttcatgttctgtgactg

SEQ ID NO: 7506 - RNA, 41 nt, synthetic construct
  source 1..41: mol_type = other RNA
tgggggcagcgcctcacacactgacttaggtgctgtgactg

SEQ ID NO: 7507 - RNA, 56 nt, synthetic construct
  source 1..56: mol_type = other RNA
tgggggcagcgcctctacacctccgaaaaaaaaaaaaaaatcatgtgctgtgactg

SEQ ID NO: 7508 - RNA, 31 nt, synthetic construct
  source 1..31: mol_type = other RNA
gggcagcgcctcacaacccacgtcatgtgct

SEQ ID NO: 7509 - RNA, 31 nt, synthetic construct
  source 1..31: mol_type = other RNA
tggtgggggcagcgcctcccggcctccgtca

SEQ ID NO: 7510 - RNA, 31 nt, synthetic construct
  source 1..31: mol_type = other RNA
tggtgggggcggcgcctcataacctccgtca

SEQ ID NO: 7511 - RNA, 39 nt, synthetic construct
  source 1..39: mol_type = other RNA
tgggggcagcgcctcacttcccgtcatgagctgtgactg

SEQ ID NO: 7512 - RNA, 43 nt, synthetic construct
  source 1..43: mol_type = other RNA
atggtggggcagcaaactcagggtagcttcgtcatgtgctgtg

SEQ ID NO: 7513 - RNA, 53 nt, synthetic construct
  source 1..53: mol_type = other RNA
tgggggcagcacctcgcaattcgtcataaaaaaaaaaaaaaatgctgtgactg

SEQ ID NO: 7514 - RNA, 31 nt, synthetic construct
  source 1..31: mol_type = other RNA
gggcagcgcctcgcgggctcagtcatgtgct

SEQ ID NO: 7515 - RNA, 39 nt, synthetic construct
  source 1..39: mol_type = other RNA
tgggggcagcacctcaaggcctccgtcatgttgtgactg

SEQ ID NO: 7516 - RNA, 41 nt, synthetic construct
  source 1..41: mol_type = other RNA
acgccacagtttcccggaggggcaatccacactcctctggg

SEQ ID NO: 7517 - RNA, 41 nt, synthetic construct
  source 1..41: mol_type = other RNA
acgccacagtttcccggaggggtcatcccagccctctgtgg

SEQ ID NO: 7518 - RNA, 41 nt, synthetic construct
  source 1..41: mol_type = other RNA
acgccacagtttcccggaggggaccataacgctcctctggg

SEQ ID NO: 7519 - RNA, 41 nt, synthetic construct
  source 1..41: mol_type = other RNA
acgccacagtttcccggaggggacatacccagtcctctggg

SEQ ID NO: 7520 - RNA, 41 nt, synthetic construct
  source 1..41: mol_type = other RNA
acgccacagtttcccggaggggacatctggggtcctctgag

SEQ ID NO: 7521 - RNA, 41 nt, synthetic construct
  source 1..41: mol_type = other RNA
acgccacagtttcccggagggggccttgacagtcctctggg

SEQ ID NO: 7522 - RNA, 41 nt, synthetic construct
  source 1..41: mol_type = other RNA
acgccacagtttcccggaggggacatgaacagtcctctggt

SEQ ID NO: 7523 - RNA, 42 nt, synthetic construct
  source 1..42: mol_type = other RNA
acgccacagtttcccggaggggtcatgcgcaggcctctgacg

SEQ ID NO: 7524 - RNA, 41 nt, synthetic construct
  source 1..41: mol_type = other RNA
acgccacagtttcccggaggtgccatcaactgccctctggg

SEQ ID NO: 7525 - RNA, 41 nt, synthetic construct
  source 1..41: mol_type = other RNA
acgccacagtttcccggagggggccttgacagtcatctggg

SEQ ID NO: 7526 - RNA, 42 nt, synthetic construct
  source 1..42: mol_type = other RNA
acgccacagtttcccggagggacaatcataccgtcctctggg

SEQ ID NO: 7527 - RNA, 41 nt, synthetic construct
  source 1..41: mol_type = other RNA
acgccacagtttcccggaggggccatacatggtcctctggc

SEQ ID NO: 7528 - RNA, 41 nt, synthetic construct
  source 1..41: mol_type = other RNA
cggaggggccatccagggtcctctaaactgcagtgatggca

SEQ ID NO: 7529 - RNA, 41 nt, synthetic construct
  source 1..41: mol_type = other RNA
cggaggggccatctggggtcctctgagtgaaagtgatggca

SEQ ID NO: 7530 - RNA, 41 nt, synthetic construct
  source 1..41: mol_type = other RNA
acgccacagtttcccggaggagccatccacactcctctggg

SEQ ID NO: 7531 - RNA, 41 nt, synthetic construct
  source 1..41: mol_type = other RNA
acgccacagtttcccggaggggaaatgcacagccctctggg

SEQ ID NO: 7532 - RNA, 41 nt, synthetic construct
  source 1..41: mol_type = other RNA
acgccacagtttcccggaggggccgtccacaatcctctggg

SEQ ID NO: 7533 - RNA, 41 nt, synthetic construct
  source 1..41: mol_type = other RNA
acgccacagtttcccggagggtacattcacagtcctctggg

SEQ ID NO: 7534 - RNA, 41 nt, synthetic construct
  source 1..41: mol_type = other RNA
acgccacagtttcccggaggggacatccacagccctctgcg

SEQ ID NO: 7535 - RNA, 40 nt, synthetic construct
  source 1..40: mol_type = other RNA
cggaggggccaactgcagtcctctcggtgcagtgatggca

SEQ ID NO: 7536 - RNA, 40 nt, synthetic construct
  source 1..40: mol_type = other RNA
acgccacagtttcccggaggacagccacagtcctctgagg

SEQ ID NO: 7537 - RNA, 41 nt, synthetic construct
  source 1..41: mol_type = other RNA
acgccacagtttcccggaggggccctcaacagtcctctggg

SEQ ID NO: 7538 - RNA, 41 nt, synthetic construct
  source 1..41: mol_type = other RNA
acgccacagtttcccggaggggccctacacattcctctagg

SEQ ID NO: 7539 - RNA, 41 nt, synthetic construct
  source 1..41: mol_type = other RNA
cggaggggccatcaacagccctctggatggcagtgatggca

SEQ ID NO: 7540 - RNA, 41 nt, synthetic construct
  source 1..41: mol_type = other RNA
acgccacagtttcccggaggggccatttccagtcctctggg

SEQ ID NO: 7541 - RNA, 41 nt, synthetic construct
  source 1..41: mol_type = other RNA
acgccacagtttcccggaggggacattcacagtcttctgga

SEQ ID NO: 7542 - RNA, 41 nt, synthetic construct
  source 1..41: mol_type = other RNA
cggaggggccatccagggtcctctaaacagcagtgatggca

SEQ ID NO: 7543 - RNA, 41 nt, synthetic construct
  source 1..41: mol_type = other RNA
acgccacagtttcccggaggggccaaacacagtcctctggg

SEQ ID NO: 7544 - RNA, 42 nt, synthetic construct
  source 1..42: mol_type = other RNA
cggaggggccatgcgcaggcctctgacgtgacagtgatggca

SEQ ID NO: 7545 - RNA, 41 nt, synthetic construct
  source 1..41: mol_type = other RNA
acgccacagtttcccggaggcgacattcaaagtcctctggg

SEQ ID NO: 7546 - RNA, 41 nt, synthetic construct
  source 1..41: mol_type = other RNA
acgccacagtttcccggaggagacataaacagtcctctggg

SEQ ID NO: 7547 - RNA, 43 nt, synthetic construct
  source 1..43: mol_type = other RNA
cggaggggccatcaactgccctctgggtaaggcagtgatggca

SEQ ID NO: 7548 - RNA, 41 nt, synthetic construct
  source 1..41: mol_type = other RNA
acgccacagtttcccggaggggccatcaacagccctctgga

SEQ ID NO: 7549 - RNA, 43 nt, synthetic construct
  source 1..43: mol_type = other RNA
cggaggggccagccacagtcctctgaggttggcagtgatggca

SEQ ID NO: 7550 - RNA, 41 nt, synthetic construct
  source 1..41: mol_type = other RNA
acgccacagtttcccggaggggtcatccagagccctctggg

SEQ ID NO: 7551 - RNA, 41 nt, synthetic construct
  source 1..41: mol_type = other RNA
cggaggggccacccacagtcctcttggtcgtagtgatggca

SEQ ID NO: 7552 - RNA, 41 nt, synthetic construct
  source 1..41: mol_type = other RNA
cggaggggccaactgcagtcctctcggtagtagtgatggca

SEQ ID NO: 7553 - RNA, 41 nt, synthetic construct
  source 1..41: mol_type = other RNA
acgccacagtttcccggaggggacatccactgtcctctgcg

SEQ ID NO: 7554 - RNA, 41 nt, synthetic construct
  source 1..41: mol_type = other RNA
acgccacagtttcccggaggggacatgaacagtcttctggt

SEQ ID NO: 7555 - RNA, 45 nt, synthetic construct
  source 1..45: mol_type = other RNA
acgccacagtttcccggaggagccctccaaataccgtcctctgga

SEQ ID NO: 7556 - RNA, 41 nt, synthetic construct
  source 1..41: mol_type = other RNA
acgccacagtttcccggagggtacattcacagtcttctggg

SEQ ID NO: 7557 - RNA, 42 nt, synthetic construct
  source 1..42: mol_type = other RNA
cggaggggccatccgacagtcctctgtgtggaagtgatggca

SEQ ID NO: 7558 - RNA, 41 nt, synthetic construct
  source 1..41: mol_type = other RNA
acgccacagtttcccggaggggtcatccacaggcctctggg

SEQ ID NO: 7559 - RNA, 41 nt, synthetic construct
  source 1..41: mol_type = other RNA
cggaggggccatccactgtcctctgcgtaaaagtgatggca

SEQ ID NO: 7560 - RNA, 41 nt, synthetic construct
  source 1..41: mol_type = other RNA
acgccacagtttcccggaggggccatacccagtcctctggg

SEQ ID NO: 7561 - RNA, 41 nt, synthetic construct
  source 1..41: mol_type = other RNA
acgccacagtttcccggaggggccctgcacagtcctctggg

SEQ ID NO: 7562 - RNA, 41 nt, synthetic construct
  source 1..41: mol_type = other RNA
acgccacagtttcccggaggggcaatccacactcatctggg

SEQ ID NO: 7563 - RNA, 41 nt, synthetic construct
  source 1..41: mol_type = other RNA
acgccacagtttcccggaggggcgatccacagtcttctggg

SEQ ID NO: 7564 - RNA, 41 nt, synthetic construct
  source 1..41: mol_type = other RNA
cggaggggccaactgcagtcctcgaggtagtagtgatggca

SEQ ID NO: 7565 - RNA, 41 nt, synthetic construct
  source 1..41: mol_type = other RNA
acgccacagtttcccggaggggccatcaccagtcctctggg

SEQ ID NO: 7566 - RNA, 41 nt, synthetic construct
  source 1..41: mol_type = other RNA
cggaggggccatacatggtcctctggctggcagtgatggca

SEQ ID NO: 7567 - RNA, 41 nt, synthetic construct
  source 1..41: mol_type = other RNA
acgccacagtttcccggaggggccatccacaatcttctggg

SEQ ID NO: 7568 - RNA, 41 nt, synthetic construct
  source 1..41: mol_type = other RNA
acgccacagtttcccggaggggccaaacacagtcttctggg

SEQ ID NO: 7569 - RNA, 41 nt, synthetic construct
  source 1..41: mol_type = other RNA
acgccacagtttcccggaggggccatctgtggccctctggg

SEQ ID NO: 7570 - RNA, 41 nt, synthetic construct
  source 1..41: mol_type = other RNA
acagccctctgggtggcagttatggcatggactgtggtcat

SEQ ID NO: 7571 - RNA, 41 nt, synthetic construct
  source 1..41: mol_type = other RNA
acgccacagtttcccggagggaccatccacggtcctctggg

SEQ ID NO: 7572 - RNA, 41 nt, synthetic construct
  source 1..41: mol_type = other RNA
acgccacagtttcccggaggggcccttgacagtcctctggg

SEQ ID NO: 7573 - RNA, 41 nt, synthetic construct
  source 1..41: mol_type = other RNA
cggaggggccctctacagtcctctgcagggcagtgatggca

SEQ ID NO: 7574 - RNA, 41 nt, synthetic construct
  source 1..41: mol_type = other RNA
cggaggggccctacacattcctctaggtgggagtgatggca

SEQ ID NO: 7575 - RNA, 41 nt, synthetic construct
  source 1..41: mol_type = other RNA
acgccacagtttcccggagggggcatccccagtcctctggg

SEQ ID NO: 7576 - RNA, 41 nt, synthetic construct
  source 1..41: mol_type = other RNA
acgccacagtttcccggaggggccatacacaatcctctggg

SEQ ID NO: 7577 - RNA, 41 nt, synthetic construct
  source 1..41: mol_type = other RNA
acgccacagtttcccggagggggcacgcacaggcctctgag

SEQ ID NO: 7578 - RNA, 40 nt, synthetic construct
  source 1..40: mol_type = other RNA
cggaggggccctgcacagtcctctgggtccagtgatggca

SEQ ID NO: 7579 - RNA, 41 nt, synthetic construct
  source 1..41: mol_type = other RNA
acgccacagtttcccggaggttacatccactgtcctctggg

SEQ ID NO: 7580 - RNA, 41 nt, synthetic construct
  source 1..41: mol_type = other RNA
acgccacagtttcccggaggggcaaggcacagtcctactgg

SEQ ID NO: 7581 - RNA, 41 nt, synthetic construct
  source 1..41: mol_type = other RNA
acgccacagtttcccggaggggacattcacagtcctctgga

SEQ ID NO: 7582 - RNA, 41 nt, synthetic construct
  source 1..41: mol_type = other RNA
acgccacagtttcccggaggggtcatgaacagtcctctacg

SEQ ID NO: 7583 - RNA, 43 nt, synthetic construct
  source 1..43: mol_type = other RNA
cggaggggccatcctctgtcctcttggcagggcagtgatggca

SEQ ID NO: 7584 - RNA, 41 nt, synthetic construct
  source 1..41: mol_type = other RNA
cggaggggccattcacagtcttctggatggcagtgatggca

SEQ ID NO: 7585 - RNA, 41 nt, synthetic construct
  source 1..41: mol_type = other RNA
acgccacagtttcccggaggggcgaactgcagtcctctcgg

SEQ ID NO: 7586 - RNA, 41 nt, synthetic construct
  source 1..41: mol_type = other RNA
cggaggggccatcataccgtcctctgggtgcagtgatggca

SEQ ID NO: 7587 - RNA, 41 nt, synthetic construct
  source 1..41: mol_type = other RNA
acaatcctctgggtgggagtcatggcatggactgtggtcat

SEQ ID NO: 7588 - RNA, 42 nt, synthetic construct
  source 1..42: mol_type = other RNA
cggaggggccatctacaggtcctctaggtggtagtgatggca

SEQ ID NO: 7589 - RNA, 38 nt, synthetic construct
  source 1..38: mol_type = other RNA
acagtcctctaggtggagatggcatggactgtggtcat

SEQ ID NO: 7590 - RNA, 41 nt, synthetic construct
  source 1..41: mol_type = other RNA
acgccacagtttcccggagggggcctccacagtcttctgca

SEQ ID NO: 7591 - RNA, 41 nt, synthetic construct
  source 1..41: mol_type = other RNA
acaggcctctgagtggaagtgatggcatggactgtggtcat

SEQ ID NO: 7592 - RNA, 41 nt, synthetic construct
  source 1..41: mol_type = other RNA
gcagtcctctgagtggcactgatggcatggactgtggtcat

SEQ ID NO: 7593 - RNA, 41 nt, synthetic construct
  source 1..41: mol_type = other RNA
acgccacagtttcccggaggggccatcgactgtcctctagg

SEQ ID NO: 7594 - RNA, 41 nt, synthetic construct
  source 1..41: mol_type = other RNA
acgccacagtttcccggagggaacatgcacagtcctctgcg

SEQ ID NO: 7595 - RNA, 41 nt, synthetic construct
  source 1..41: mol_type = other RNA
acagtcctctgagtaaccgtgatggcatggactgtggtcat

SEQ ID NO: 7596 - RNA, 42 nt, synthetic construct
  source 1..42: mol_type = other RNA
cggaggggccatctacagtcctctcggtagggagtgatggca

SEQ ID NO: 7597 - RNA, 41 nt, synthetic construct
  source 1..41: mol_type = other RNA
cggaggggccacgtacaggcctctgagtggaagtgatggca

SEQ ID NO: 7598 - RNA, 41 nt, synthetic construct
  source 1..41: mol_type = other RNA
acgccacagtttcccggagggccaatccccagtcctctggg

SEQ ID NO: 7599 - RNA, 41 nt, synthetic construct
  source 1..41: mol_type = other RNA
cggaggggccatccacactcctctgggaggcagtgatggca

SEQ ID NO: 7600 - RNA, 41 nt, synthetic construct
  source 1..41: mol_type = other RNA
acgccacagtttcccggagggggcctccacagtcctctgca

SEQ ID NO: 7601 - RNA, 41 nt, synthetic construct
  source 1..41: mol_type = other RNA
acgccacagtttcccggaggggtcatgaacagtcttctacg

SEQ ID NO: 7602 - RNA, 41 nt, synthetic construct
  source 1..41: mol_type = other RNA
cggaggggccatccccggtcctctgggtggaagtgatggca

SEQ ID NO: 7603 - RNA, 41 nt, synthetic construct
  source 1..41: mol_type = other RNA
cggaggggccatacacaatcatctgggtgggagtgatggca

SEQ ID NO: 7604 - RNA, 41 nt, synthetic construct
  source 1..41: mol_type = other RNA
cggaggggccatacacaatcctctgggtgggagtgatggca

SEQ ID NO: 7605 - RNA, 41 nt, synthetic construct
  source 1..41: mol_type = other RNA
acgccacagtttcccggaggcaccctccacagtcctctggg

SEQ ID NO: 7606 - RNA, 41 nt, synthetic construct
  source 1..41: mol_type = other RNA
acgccacagtttcccggaggggccgtccacagtcctctggg

SEQ ID NO: 7607 - RNA, 41 nt, synthetic construct
  source 1..41: mol_type = other RNA
acagtcctctgggaaggagtgatggcatggactgtggtcat

SEQ ID NO: 7608 - RNA, 41 nt, synthetic construct
  source 1..41: mol_type = other RNA
cggaggggccatgaacagtcctctacgtggcagtgatggca

SEQ ID NO: 7609 - RNA, 41 nt, synthetic construct
  source 1..41: mol_type = other RNA
acgccacagtttcccggaggggccatccacactcctctggg

SEQ ID NO: 7610 - RNA, 40 nt, synthetic construct
  source 1..40: mol_type = other RNA
acgccacagtttcccggaggggccatccatagtcctctgc

SEQ ID NO: 7611 - RNA, 41 nt, synthetic construct
  source 1..41: mol_type = other RNA
acgccacagtttcccggaggggccatacatggtcatctggc

SEQ ID NO: 7612 - RNA, 41 nt, synthetic construct
  source 1..41: mol_type = other RNA
acgccacagtttcccggaggggcaatccacagtcctctgcg

SEQ ID NO: 7613 - RNA, 41 nt, synthetic construct
  source 1..41: mol_type = other RNA
acgccacagtttcccggaggggccatacacagtcctccggg

SEQ ID NO: 7614 - RNA, 41 nt, synthetic construct
  source 1..41: mol_type = other RNA
cggaggggccatttacagtcttctggatggcagtgatggca

SEQ ID NO: 7615 - RNA, 41 nt, synthetic construct
  source 1..41: mol_type = other RNA
cggaggggccatgcacagccctctgggtggcagtgatggca

SEQ ID NO: 7616 - RNA, 42 nt, synthetic construct
  source 1..42: mol_type = other RNA
acagtcctctcggtagggtgaaatggcatggactgtggtcat

SEQ ID NO: 7617 - RNA, 41 nt, synthetic construct
  source 1..41: mol_type = other RNA
acgccacagtttcccggaggggccatccacagttttctggg

SEQ ID NO: 7618 - RNA, 41 nt, synthetic construct
  source 1..41: mol_type = other RNA
cggaggggccattcacagtcctctggatggcagtgatggca

SEQ ID NO: 7619 - RNA, 41 nt, synthetic construct
  source 1..41: mol_type = other RNA
acgccacagtttcccggaggtgccatccacagtcttctggg

SEQ ID NO: 7620 - RNA, 41 nt, synthetic construct
  source 1..41: mol_type = other RNA
acgccacagtttcccggaggggacatccacagtcttctgag

SEQ ID NO: 7621 - RNA, 40 nt, synthetic construct
  source 1..40: mol_type = other RNA
agagccctctgggtgtagtgatggcatggactgtggtcat

SEQ ID NO: 7622 - RNA, 41 nt, synthetic construct
  source 1..41: mol_type = other RNA
acgccacagtttcccggaggggccatctacagtcctctcgg

SEQ ID NO: 7623 - RNA, 41 nt, synthetic construct
  source 1..41: mol_type = other RNA
acgccacagtttcccggaggggccatccacagttctctggg

SEQ ID NO: 7624 - RNA, 41 nt, synthetic construct
  source 1..41: mol_type = other RNA
acagtcctctgggtgatagtgatggcatggactgtggtcat

SEQ ID NO: 7625 - RNA, 41 nt, synthetic construct
  source 1..41: mol_type = other RNA
acgccacagtttcccggaggggccatccacaatcctctggg

SEQ ID NO: 7626 - RNA, 40 nt, synthetic construct
  source 1..40: mol_type = other RNA
cggaggggccgtccacagtcttctgggtacagtgatggca

SEQ ID NO: 7627 - RNA, 41 nt, synthetic construct
  source 1..41: mol_type = other RNA
cggaggggccatccacagacccctgggtcacagtgatggca

SEQ ID NO: 7628 - RNA, 41 nt, synthetic construct
  source 1..41: mol_type = other RNA
cggaggggccatcgactgtcctctaggtggcagtgatggca

SEQ ID NO: 7629 - RNA, 41 nt, synthetic construct
  source 1..41: mol_type = other RNA
acagccctctggatggctgtgatggcatggactgtggtcat

SEQ ID NO: 7630 - RNA, 41 nt, synthetic construct
  source 1..41: mol_type = other RNA
acgccacagtttcccggaggggtcatacacagtcctctggg

SEQ ID NO: 7631 - RNA, 41 nt, synthetic construct
  source 1..41: mol_type = other RNA
acgccacagtttcccggaggggccatcaacagtcctctggg

SEQ ID NO: 7632 - RNA, 43 nt, synthetic construct
  source 1..43: mol_type = other RNA
cggaggggccatccactgtcctctgggtagggcagtgatggca

SEQ ID NO: 7633 - RNA, 42 nt, synthetic construct
  source 1..42: mol_type = other RNA
cggaggggccatccgacagtcttctgtgtggaagtgatggca

SEQ ID NO: 7634 - RNA, 41 nt, synthetic construct
  source 1..41: mol_type = other RNA
cggaggggccatccccagtcttctcggtagcagtgatggca

SEQ ID NO: 7635 - RNA, 49 nt, synthetic construct
  source 1..49: mol_type = other RNA
cggaggggccctccaaataccgtcctctggaaaaatggcagtgatggca

SEQ ID NO: 7636 - RNA, 41 nt, synthetic construct
  source 1..41: mol_type = other RNA
cggaggggccatccacagccctctgcgtggcagtgatggca

SEQ ID NO: 7637 - RNA, 41 nt, synthetic construct
  source 1..41: mol_type = other RNA
cggaggggccatccacagtcctctgagtaacagtgatggca

SEQ ID NO: 7638 - RNA, 41 nt, synthetic construct
  source 1..41: mol_type = other RNA
cggaggggccatcaacagccttctggatggcagtgatggca

SEQ ID NO: 7639 - RNA, 41 nt, synthetic construct
  source 1..41: mol_type = other RNA
cggaggggccatcaacagtcctctgggtggaagtgatggca

SEQ ID NO: 7640 - RNA, 41 nt, synthetic construct
  source 1..41: mol_type = other RNA
acgccacagtttcccggaggggccatccacagtcttctggg

SEQ ID NO: 7641 - RNA, 41 nt, synthetic construct
  source 1..41: mol_type = other RNA
acagtcctctgggtggaattgatggcatggactgtggtcat

SEQ ID NO: 7642 - RNA, 41 nt, synthetic construct
  source 1..41: mol_type = other RNA
acgccacagtttcccggaggggcgatccacagtcctctggg

SEQ ID NO: 7643 - RNA, 41 nt, synthetic construct
  source 1..41: mol_type = other RNA
cggaggggccatgcacagtcctctgcgtggcagtgatggca

SEQ ID NO: 7644 - RNA, 38 nt, synthetic construct
  source 1..38: mol_type = other RNA
cggaggggccatctatagtcctctgcgcagtgatggca

SEQ ID NO: 7645 - RNA, 41 nt, synthetic construct
  source 1..41: mol_type = other RNA
acgccacagtttcccggaggagccatccacactcttctggg

SEQ ID NO: 7646 - RNA, 40 nt, synthetic construct
  source 1..40: mol_type = other RNA
acgccacagtttcccggaggggtcatccgcagtcctctgg

SEQ ID NO: 7647 - RNA, 41 nt, synthetic construct
  source 1..41: mol_type = other RNA
acgccacagtttcccggaggggacatccacagtcttctggg

SEQ ID NO: 7648 - RNA, 41 nt, synthetic construct
  source 1..41: mol_type = other RNA
acgccacagtttcccggagggaccatccacagtgctctggg

SEQ ID NO: 7649 - RNA, 41 nt, synthetic construct
  source 1..41: mol_type = other RNA
acgccacagtttcccggaggcgttgtaaaccgtcctctgcg

SEQ ID NO: 7650 - RNA, 41 nt, synthetic construct
  source 1..41: mol_type = other RNA
acgccacagtttcccggaggggaactccacggcttcctggg

SEQ ID NO: 7651 - RNA, 41 nt, synthetic construct
  source 1..41: mol_type = other RNA
acgccacagtttcccggaggggccatgcacagttctctggg

SEQ ID NO: 7652 - RNA, 41 nt, synthetic construct
  source 1..41: mol_type = other RNA
acgccacagtttcccggaggggtcattcacagtcctctggg

SEQ ID NO: 7653 - RNA, 41 nt, synthetic construct
  source 1..41: mol_type = other RNA
acgccacagtttcccggaggggccatccatagttctctggg

SEQ ID NO: 7654 - RNA, 41 nt, synthetic construct
  source 1..41: mol_type = other RNA
acgccacagtttcccggagggggcatccacagtcctccggg

SEQ ID NO: 7655 - RNA, 41 nt, synthetic construct
  source 1..41: mol_type = other RNA
cggaggggccatccacactcatctgggtggcagtgatggca

SEQ ID NO: 7656 - RNA, 41 nt, synthetic construct
  source 1..41: mol_type = other RNA
acgccacagtttcccggaggggccaactgcagtcctctcgg

SEQ ID NO: 7657 - RNA, 41 nt, synthetic construct
  source 1..41: mol_type = other RNA
acgccacagtttcccggaggggccatccatagtcctctggg

SEQ ID NO: 7658 - RNA, 41 nt, synthetic construct
  source 1..41: mol_type = other RNA
cggaggggccatccacagtcctctgggtggcagtgatggca

SEQ ID NO: 7659 - RNA, 42 nt, synthetic construct
  source 1..42: mol_type = other RNA
cggaggggccatgcgcaggcttctgacgtgacagtgatggca

SEQ ID NO: 7660 - RNA, 41 nt, synthetic construct
  source 1..41: mol_type = other RNA
acgccacagtttcccggaggggacattcaaagtcccctggg

SEQ ID NO: 7661 - RNA, 41 nt, synthetic construct
  source 1..41: mol_type = other RNA
cggaggggccatccccagtcctctcggtgatagtgatggca

SEQ ID NO: 7662 - RNA, 41 nt, synthetic construct
  source 1..41: mol_type = other RNA
acgccacagtttcccggaggggacatccacagtcctctgag

SEQ ID NO: 7663 - RNA, 41 nt, synthetic construct
  source 1..41: mol_type = other RNA
cggaggggccatctacaatccttgggttggcagtgatggca

SEQ ID NO: 7664 - RNA, 41 nt, synthetic construct
  source 1..41: mol_type = other RNA
ccggtcctctgggtggaagtgatggcatggactgtggtcat

SEQ ID NO: 7665 - RNA, 41 nt, synthetic construct
  source 1..41: mol_type = other RNA
acgccacagtttcccggaggggacatccagggtcctctaaa

SEQ ID NO: 7666 - RNA, 41 nt, synthetic construct
  source 1..41: mol_type = other RNA
cggaggggccaggcacagtcctactggtggcagtgatggca

SEQ ID NO: 7667 - RNA, 41 nt, synthetic construct
  source 1..41: mol_type = other RNA
acgccacagtttcccggaggggccgtccacagtcttctggg

SEQ ID NO: 7668 - RNA, 40 nt, synthetic construct
  source 1..40: mol_type = other RNA
acgccacagtttcccggaggggtcatccgcagtcatctgg

SEQ ID NO: 7669 - RNA, 41 nt, synthetic construct
  source 1..41: mol_type = other RNA
cggaggggccctccacagtcttctgggcggcagtgatggca

SEQ ID NO: 7670 - RNA, 41 nt, synthetic construct
  source 1..41: mol_type = other RNA
cggaggggccatccacagtcctctaggtggcagtgatggca

SEQ ID NO: 7671 - RNA, 41 nt, synthetic construct
  source 1..41: mol_type = other RNA
cggaggggccatttacagtcctctggatggcagtgatggca

SEQ ID NO: 7672 - RNA, 41 nt, synthetic construct
  source 1..41: mol_type = other RNA
acgccacagtttcccggaggggtcatccgcagtcctctgag

SEQ ID NO: 7673 - RNA, 41 nt, synthetic construct
  source 1..41: mol_type = other RNA
cggaggggccatccagagtccctctggtggcagtgatggca

SEQ ID NO: 7674 - RNA, 41 nt, synthetic construct
  source 1..41: mol_type = other RNA
acgccacagtttcccggaggggccatccacagccctctggg

SEQ ID NO: 7675 - RNA, 41 nt, synthetic construct
  source 1..41: mol_type = other RNA
acgccacagtttcccggaggggccatccacactcgtctggg

SEQ ID NO: 7676 - RNA, 41 nt, synthetic construct
  source 1..41: mol_type = other RNA
cggaggggccatccccagtcctctgggtgatagtgatggca

SEQ ID NO: 7677 - RNA, 41 nt, synthetic construct
  source 1..41: mol_type = other RNA
acgccacagtttcccggaggggccatccacagtcctctgcg

SEQ ID NO: 7678 - RNA, 41 nt, synthetic construct
  source 1..41: mol_type = other RNA
cggaggggccatccacagccctctgggcggcagtgatggca

SEQ ID NO: 7679 - RNA, 41 nt, synthetic construct
  source 1..41: mol_type = other RNA
acgccacagtttcccggaggggccatccccagtcctctggg

SEQ ID NO: 7680 - RNA, 41 nt, synthetic construct
  source 1..41: mol_type = other RNA
acgccacagtttcccggaggggccatacacaatcatctggg

SEQ ID NO: 7681 - RNA, 41 nt, synthetic construct
  source 1..41: mol_type = other RNA
acagtcctctgcgtagctgtaatggcatggactgtggtcat

SEQ ID NO: 7682 - RNA, 41 nt, synthetic construct
  source 1..41: mol_type = other RNA
acgccacagtttcccggaggggccatccacagtcttctgcg

SEQ ID NO: 7683 - RNA, 41 nt, synthetic construct
  source 1..41: mol_type = other RNA
cggaggggccatccacaatcctctgggtggcagtgatggca

SEQ ID NO: 7684 - RNA, 41 nt, synthetic construct
  source 1..41: mol_type = other RNA
acgccacagtttcccggaggggccatccatagttgtctggg

SEQ ID NO: 7685 - RNA, 41 nt, synthetic construct
  source 1..41: mol_type = other RNA
acagtcctctgggtggcactgatggcatggactgtggtcat

SEQ ID NO: 7686 - RNA, 41 nt, synthetic construct
  source 1..41: mol_type = other RNA
acagccctctgggcggcagtgatggcatggactgtggtcat

SEQ ID NO: 7687 - RNA, 41 nt, synthetic construct
  source 1..41: mol_type = other RNA
ccagtcctctgggtggcgatgatggcatggactgtggtcat

SEQ ID NO: 7688 - RNA, 41 nt, synthetic construct
  source 1..41: mol_type = other RNA
cggaggggccatccacagtcctctgggaaggagtgatggca

SEQ ID NO: 7689 - RNA, 41 nt, synthetic construct
  source 1..41: mol_type = other RNA
acgccacagtttcccggaggggcatctcaaaggcctctggc

SEQ ID NO: 7690 - RNA, 41 nt, synthetic construct
  source 1..41: mol_type = other RNA
cggaggggccattcacagccctctgggtggcagtgatggca

SEQ ID NO: 7691 - RNA, 41 nt, synthetic construct
  source 1..41: mol_type = other RNA
acagtcctctgcagggcagtgatggcatggactgtggtcat

SEQ ID NO: 7692 - RNA, 41 nt, synthetic construct
  source 1..41: mol_type = other RNA
ccagtcctctgggtggcgttgatggcatggactgtggtcat

SEQ ID NO: 7693 - RNA, 41 nt, synthetic construct
  source 1..41: mol_type = other RNA
acgccacagtttcccggaggggccattcacagtcctctgga

SEQ ID NO: 7694 - RNA, 41 nt, synthetic construct
  source 1..41: mol_type = other RNA
acgccacagtttcccggaggggtcatccacggtcccctggg

SEQ ID NO: 7695 - RNA, 41 nt, synthetic construct
  source 1..41: mol_type = other RNA
acagtcctccgggtggtcgtgatggcatggactgtggtcat

SEQ ID NO: 7696 - RNA, 41 nt, synthetic construct
  source 1..41: mol_type = other RNA
acgccacagtttcccggaggagtcatccgcaggcctatggg

SEQ ID NO: 7697 - RNA, 41 nt, synthetic construct
  source 1..41: mol_type = other RNA
cggaggggccatccatagtcgtctgggtggcagtgatggca

SEQ ID NO: 7698 - RNA, 42 nt, synthetic construct
  source 1..42: mol_type = other RNA
acgccacagtttcccggaggggccatccgacagtcctctgtg

SEQ ID NO: 7699 - RNA, 41 nt, synthetic construct
  source 1..41: mol_type = other RNA
cggaggggccatccacagtcttttgggtagcagtgatggca

SEQ ID NO: 7700 - RNA, 40 nt, synthetic construct
  source 1..40: mol_type = other RNA
cggaggggccatccgcagtcatctggtcgcagtgatggca

SEQ ID NO: 7701 - RNA, 42 nt, synthetic construct
  source 1..42: mol_type = other RNA
acgccacagtttcccggaggggccatccgacagtcttctgtg

SEQ ID NO: 7702 - RNA, 41 nt, synthetic construct
  source 1..41: mol_type = other RNA
cggaggggccatccacagtcctctgggtgatagtgatggca

SEQ ID NO: 7703 - RNA, 41 nt, synthetic construct
  source 1..41: mol_type = other RNA
cggaggggccgtccacagtcctctgggtggcagtgatggca

SEQ ID NO: 7704 - RNA, 40 nt, synthetic construct
  source 1..40: mol_type = other RNA
acgccacagtttcccggaggggccatctacagtccttggg

SEQ ID NO: 7705 - RNA, 41 nt, synthetic construct
  source 1..41: mol_type = other RNA
cggaggggccatccccagtcctctcggtagcagtgatggca

SEQ ID NO: 7706 - RNA, 41 nt, synthetic construct
  source 1..41: mol_type = other RNA
acgccacagtttcccggaggcaccctccacagtcttctggg

SEQ ID NO: 7707 - RNA, 41 nt, synthetic construct
  source 1..41: mol_type = other RNA
cggaggggccattcacagtcctctgggtggcagtgatggca

SEQ ID NO: 7708 - RNA, 41 nt, synthetic construct
  source 1..41: mol_type = other RNA
cggaggggccatcctcagtcctcttgggggcagtgatggca

SEQ ID NO: 7709 - RNA, 41 nt, synthetic construct
  source 1..41: mol_type = other RNA
cggaggggccatacacagtcctccgggtagcagtgatggca

SEQ ID NO: 7710 - RNA, 41 nt, synthetic construct
  source 1..41: mol_type = other RNA
acgccacagtttcccggaggggccatcaacagccttctgga

SEQ ID NO: 7711 - RNA, 41 nt, synthetic construct
  source 1..41: mol_type = other RNA
cggaggggccatccccagtcctctaagtggcagtgatggca

SEQ ID NO: 7712 - RNA, 41 nt, synthetic construct
  source 1..41: mol_type = other RNA
acagtcctctgggtggcagcgatggcatggactgtggtcat

SEQ ID NO: 7713 - RNA, 41 nt, synthetic construct
  source 1..41: mol_type = other RNA
acagtcctcttggtcgtggtgatggcatggactgtggtcat

SEQ ID NO: 7714 - RNA, 41 nt, synthetic construct
  source 1..41: mol_type = other RNA
cggaggggccatccacagtcttctgggtgatagtgatggca

SEQ ID NO: 7715 - RNA, 40 nt, synthetic construct
  source 1..40: mol_type = other RNA
acagtcctctgggtgcagtgatggcatggactgtggtcat

SEQ ID NO: 7716 - RNA, 41 nt, synthetic construct
  source 1..41: mol_type = other RNA
acgccacagtttcccggaggagccatccacagtcctctggg

SEQ ID NO: 7717 - RNA, 40 nt, synthetic construct
  source 1..40: mol_type = other RNA
cggaggggccatctacagtccttgggttgcagtgatggca

SEQ ID NO: 7718 - RNA, 41 nt, synthetic construct
  source 1..41: mol_type = other RNA
cggaggggccatacatggtcatctggctggcagtgatggca

SEQ ID NO: 7719 - RNA, 41 nt, synthetic construct
  source 1..41: mol_type = other RNA
ccagtcctctgggtggaagtgatggcatggactgtggtcat

SEQ ID NO: 7720 - RNA, 41 nt, synthetic construct
  source 1..41: mol_type = other RNA
ggggtcctctgagtgaaagtgatggcatggactgtggtcat

SEQ ID NO: 7721 - RNA, 41 nt, synthetic construct
  source 1..41: mol_type = other RNA
acaatcctctgggtggcaagaatggcatggactgtggtcat

SEQ ID NO: 7722 - RNA, 41 nt, synthetic construct
  source 1..41: mol_type = other RNA
gcagtcctctcggtagtcgtgatggcatggactgtggtcat

SEQ ID NO: 7723 - RNA, 41 nt, synthetic construct
  source 1..41: mol_type = other RNA
acgccacagtttcccggaggggccctgcacagtcttctggg

SEQ ID NO: 7724 - RNA, 41 nt, synthetic construct
  source 1..41: mol_type = other RNA
cggaggggccatccagagtccttctggtggcagtgatggca

SEQ ID NO: 7725 - RNA, 41 nt, synthetic construct
  source 1..41: mol_type = other RNA
acagtcctctgcggagcagtgatggcatggactgtggtcat

SEQ ID NO: 7726 - RNA, 41 nt, synthetic construct
  source 1..41: mol_type = other RNA
atagtcctctgggtggccgtgatggcatggactgtggtcat

SEQ ID NO: 7727 - RNA, 41 nt, synthetic construct
  source 1..41: mol_type = other RNA
cggaggggccatccacagtcttctggggggcagtgatggca

SEQ ID NO: 7728 - RNA, 41 nt, synthetic construct
  source 1..41: mol_type = other RNA
acgccacagtttcccggaggggccatccacagtcttctgag

SEQ ID NO: 7729 - RNA, 41 nt, synthetic construct
  source 1..41: mol_type = other RNA
cggaggggccattcacagccttctgggtggcagtgatggca

SEQ ID NO: 7730 - RNA, 41 nt, synthetic construct
  source 1..41: mol_type = other RNA
cggaggggccatccacagacctctgggtagcagtgatggca

SEQ ID NO: 7731 - RNA, 41 nt, synthetic construct
  source 1..41: mol_type = other RNA
acagtcctctggatggcagtgatggcatggactgtggtcat

SEQ ID NO: 7732 - RNA, 41 nt, synthetic construct
  source 1..41: mol_type = other RNA
acagccctctgcgtggcagtgatggcatggactgtggtcat

SEQ ID NO: 7733 - RNA, 40 nt, synthetic construct
  source 1..40: mol_type = other RNA
acagtcctctgggtccggtgatggcatggactgtggtcat

SEQ ID NO: 7734 - RNA, 41 nt, synthetic construct
  source 1..41: mol_type = other RNA
acgccacagtttcccggaggggacatccccagacccctggg

SEQ ID NO: 7735 - RNA, 41 nt, synthetic construct
  source 1..41: mol_type = other RNA
cggaggggccatccacagtcctctgcgtagcagtgatggca

SEQ ID NO: 7736 - RNA, 41 nt, synthetic construct
  source 1..41: mol_type = other RNA
acagtcttctgggtggtggtgatggcatggactgtggtcat

SEQ ID NO: 7737 - RNA, 40 nt, synthetic construct
  source 1..40: mol_type = other RNA
cggaggggccatccgcagtcctctggtcgcagtgatggca

SEQ ID NO: 7738 - RNA, 41 nt, synthetic construct
  source 1..41: mol_type = other RNA
cggaggggccatttacagtcctctgggtggcagtgatggca

SEQ ID NO: 7739 - RNA, 41 nt, synthetic construct
  source 1..41: mol_type = other RNA
acagtcctctcggtggccgaaatggcatggactgtggtcat

SEQ ID NO: 7740 - RNA, 41 nt, synthetic construct
  source 1..41: mol_type = other RNA
cggaggggccatccacagtcctctggggggcagtgatggca

SEQ ID NO: 7741 - RNA, 41 nt, synthetic construct
  source 1..41: mol_type = other RNA
cggaggggccatccgcagtcttctgagtggcagtgatggca

SEQ ID NO: 7742 - RNA, 41 nt, synthetic construct
  source 1..41: mol_type = other RNA
cggaggggccattcaaagtcctctgggtggcagtgatggca

SEQ ID NO: 7743 - RNA, 43 nt, synthetic construct
  source 1..43: mol_type = other RNA
actgtcctctgggtagggcagtgatggcatggactgtggtcat

SEQ ID NO: 7744 - RNA, 41 nt, synthetic construct
  source 1..41: mol_type = other RNA
cggaggggccatacccagtcctctgggagggagtgatggca

SEQ ID NO: 7745 - RNA, 41 nt, synthetic construct
  source 1..41: mol_type = other RNA
cggaggggccatccacagtcgtctgggtggaagtgatggca

SEQ ID NO: 7746 - RNA, 41 nt, synthetic construct
  source 1..41: mol_type = other RNA
cggaggggccatccacagtcttctgagtaacagtgatggca

SEQ ID NO: 7747 - RNA, 52 nt, synthetic construct
  source 1..52: mol_type = other RNA
acgccacagtttcccggaggggtcccaaggtgaccatccagagtccctctgg

SEQ ID NO: 7748 - RNA, 41 nt, synthetic construct
  source 1..41: mol_type = other RNA
acgccacagtttcccggaggggccatccacagtcctcgggg

SEQ ID NO: 7749 - RNA, 41 nt, synthetic construct
  source 1..41: mol_type = other RNA
cggaggggcccttgacagtcatctgggtggcagtgatggca

SEQ ID NO: 7750 - RNA, 41 nt, synthetic construct
  source 1..41: mol_type = other RNA
cggaggggccatccacagccttctgggtggcagtgatggca

SEQ ID NO: 7751 - RNA, 41 nt, synthetic construct
  source 1..41: mol_type = other RNA
acgccacagtttcccggaggggccatccatggttctctgag

SEQ ID NO: 7752 - RNA, 41 nt, synthetic construct
  source 1..41: mol_type = other RNA
cggaggggccctctacagtcttctgcagggcagtgatggca

SEQ ID NO: 7753 - RNA, 41 nt, synthetic construct
  source 1..41: mol_type = other RNA
cggaggggccatccacaatcttctgggtggcagtgatggca

SEQ ID NO: 7754 - RNA, 41 nt, synthetic construct
  source 1..41: mol_type = other RNA
cggaggggccatccacagtgttctgggtggcagtgatggca

SEQ ID NO: 7755 - RNA, 41 nt, synthetic construct
  source 1..41: mol_type = other RNA
acagtcctctggggggcatggatggcatggactgtggtcat

SEQ ID NO: 7756 - RNA, 41 nt, synthetic construct
  source 1..41: mol_type = other RNA
acgccacagtttcccggaggggccatccacagtcctccggg

SEQ ID NO: 7757 - RNA, 41 nt, synthetic construct
  source 1..41: mol_type = other RNA
ccagtcctctgggtggcggtgatggcatggactgtggtcat

SEQ ID NO: 7758 - RNA, 41 nt, synthetic construct
  source 1..41: mol_type = other RNA
acgccacagtttcccggaggggccaatccagcacctctgga

SEQ ID NO: 7759 - RNA, 41 nt, synthetic construct
  source 1..41: mol_type = other RNA
gcagtcctctcggtgcccatgatggcatggactgtggtcat

SEQ ID NO: 7760 - RNA, 40 nt, synthetic construct
  source 1..40: mol_type = other RNA
acagtcctctgggtacagtaatggcatggactgtggtcat

SEQ ID NO: 7761 - RNA, 39 nt, synthetic construct
  source 1..39: mol_type = other RNA
agtcttatgggtgacagtgatggcatggactgtggtcat

SEQ ID NO: 7762 - RNA, 41 nt, synthetic construct
  source 1..41: mol_type = other RNA
atggtcctctggctggccgtgatggcatggactgtggtcat

SEQ ID NO: 7763 - RNA, 43 nt, synthetic construct
  source 1..43: mol_type = other RNA
accgtcctctgggtgcatttgtgatggcatggactgtggtcat

SEQ ID NO: 7764 - RNA, 41 nt, synthetic construct
  source 1..41: mol_type = other RNA
acagtcttctggatggcagtgatggcatggactgtggtcat

SEQ ID NO: 7765 - RNA, 41 nt, synthetic construct
  source 1..41: mol_type = other RNA
acagtcctctgggcggcagtgatggcatggactgtggtcat

SEQ ID NO: 7766 - RNA, 41 nt, synthetic construct
  source 1..41: mol_type = other RNA
cggaggggccatccgcagtcctctgagtggcagtgatggca

SEQ ID NO: 7767 - RNA, 41 nt, synthetic construct
  source 1..41: mol_type = other RNA
acgccacagtttcccggaggggccatctcaagtcctctcgg

SEQ ID NO: 7768 - RNA, 41 nt, synthetic construct
  source 1..41: mol_type = other RNA
acgccacagtttcccggaggggccatctacagtcctccggg

SEQ ID NO: 7769 - RNA, 41 nt, synthetic construct
  source 1..41: mol_type = other RNA
cggaggggccatatacagtcctctgggtggcagtgatggca

SEQ ID NO: 7770 - RNA, 41 nt, synthetic construct
  source 1..41: mol_type = other RNA
cggaggggccatccacagtgctctgggtggcagtgatggca

SEQ ID NO: 7771 - RNA, 41 nt, synthetic construct
  source 1..41: mol_type = other RNA
acgccacagtttcccggagggaccatccacagtgttctggg

SEQ ID NO: 7772 - RNA, 41 nt, synthetic construct
  source 1..41: mol_type = other RNA
cggaggggccatccacagtcctccgggtggtagtgatggca

SEQ ID NO: 7773 - RNA, 41 nt, synthetic construct
  source 1..41: mol_type = other RNA
acggtttcatgggtgccagtgatggcatggactgtggtcat

SEQ ID NO: 7774 - RNA, 42 nt, synthetic construct
  source 1..42: mol_type = other RNA
acgccacagtttcccggaggggacatctacaggtcctctagg

SEQ ID NO: 7775 - RNA, 42 nt, synthetic construct
  source 1..42: mol_type = other RNA
gacagtcctctgtgtggaaggtatggcatggactgtggtcat

SEQ ID NO: 7776 - RNA, 41 nt, synthetic construct
  source 1..41: mol_type = other RNA
acagtcttctgagtaaccgtgatggcatggactgtggtcat

SEQ ID NO: 7777 - RNA, 43 nt, synthetic construct
  source 1..43: mol_type = other RNA
cggaggggccatccacggtcccctgggtcaagcagtgatggca

SEQ ID NO: 7778 - RNA, 41 nt, synthetic construct
  source 1..41: mol_type = other RNA
acgccacagtttcccggaggggccatcctcagtcctcttgg

SEQ ID NO: 7779 - RNA, 41 nt, synthetic construct
  source 1..41: mol_type = other RNA
ccagtcctctgggagggagtgatggcatggactgtggtcat

SEQ ID NO: 7780 - RNA, 41 nt, synthetic construct
  source 1..41: mol_type = other RNA
cggaggggccaaatacagtcttctgggtggcagtgatggca

SEQ ID NO: 7781 - RNA, 41 nt, synthetic construct
  source 1..41: mol_type = other RNA
cggaggggccatccacactcgtctgggtggcagtgatggca

SEQ ID NO: 7782 - RNA, 41 nt, synthetic construct
  source 1..41: mol_type = other RNA
ccagtcctctaagtggcagtgatggcatggactgtggtcat

SEQ ID NO: 7783 - RNA, 41 nt, synthetic construct
  source 1..41: mol_type = other RNA
cggaggggccatccatagtcctctgggtggcagtgatggca

SEQ ID NO: 7784 - RNA, 41 nt, synthetic construct
  source 1..41: mol_type = other RNA
acagtcctctaggtggcaatgatggcatggactgtggtcat

SEQ ID NO: 7785 - RNA, 41 nt, synthetic construct
  source 1..41: mol_type = other RNA
cggaggggccatccacactcctctgggtggcagtgatggca

SEQ ID NO: 7786 - RNA, 41 nt, synthetic construct
  source 1..41: mol_type = other RNA
acgccacagtttcccggaggggccatccaccactttctggg

SEQ ID NO: 7787 - RNA, 41 nt, synthetic construct
  source 1..41: mol_type = other RNA
acggtcctctgggtggcagtgatggcatggactgtggtcat

SEQ ID NO: 7788 - RNA, 44 nt, synthetic construct
  source 1..44: mol_type = other RNA
acgccacagtttcccggaggggacataaacagtttgcctctgcg

SEQ ID NO: 7789 - RNA, 43 nt, synthetic construct
  source 1..43: mol_type = other RNA
agcacctctggatggcagtagtgatggcatggactgtggtcat

SEQ ID NO: 7790 - RNA, 42 nt, synthetic construct
  source 1..42: mol_type = other RNA
acgccacagtttcccggaggggtcatgcgcaggcttctgacg

SEQ ID NO: 7791 - RNA, 41 nt, synthetic construct
  source 1..41: mol_type = other RNA
cggaggggccatctcaagtcctctcggcggcagtgatggca

SEQ ID NO: 7792 - RNA, 41 nt, synthetic construct
  source 1..41: mol_type = other RNA
acgccacagtttcccggaggggtcacccacagtcctctcgg

SEQ ID NO: 7793 - RNA, 41 nt, synthetic construct
  source 1..41: mol_type = other RNA
cggaggggccatacccggtcctctgggtggaagtgatggca

SEQ ID NO: 7794 - RNA, 40 nt, synthetic construct
  source 1..40: mol_type = other RNA
cggaggggccataacgctcctctgggtgtcagtgatggca

SEQ ID NO: 7795 - RNA, 40 nt, synthetic construct
  source 1..40: mol_type = other RNA
cggaggggccgtccacagtcctctgggtacagtgatggca

SEQ ID NO: 7796 - RNA, 41 nt, synthetic construct
  source 1..41: mol_type = other RNA
acgccacagtttcccggaggggccatccacagtcctctggg

SEQ ID NO: 7797 - RNA, 41 nt, synthetic construct
  source 1..41: mol_type = other RNA
cggaggggccatctgtggccctctgggtggcagtgatggca

SEQ ID NO: 7798 - RNA, 41 nt, synthetic construct
  source 1..41: mol_type = other RNA
cggaggggccctccacagtcctctgggcggcagtgatggca

SEQ ID NO: 7799 - RNA, 41 nt, synthetic construct
  source 1..41: mol_type = other RNA
cggaggggccatgaacagtcttctacgtggcagtgatggca

SEQ ID NO: 7800 - RNA, 41 nt, synthetic construct
  source 1..41: mol_type = other RNA
cggaggggccatccacggtcctctgggtggcagtgatggca

SEQ ID NO: 7801 - RNA, 41 nt, synthetic construct
  source 1..41: mol_type = other RNA
cggaggggccatttacagtcttctgggtggcagtgatggca

SEQ ID NO: 7802 - RNA, 38 nt, synthetic construct
  source 1..38: mol_type = other RNA
acgccacagtttcccggaggggccatcagtcttatggg

SEQ ID NO: 7803 - RNA, 41 nt, synthetic construct
  source 1..41: mol_type = other RNA
cggaggggccatctacagtcctccgggtggtagtgatggca

SEQ ID NO: 7804 - RNA, 41 nt, synthetic construct
  source 1..41: mol_type = other RNA
acgccacagtttcccggaggggtcatccacagtcctctagg

SEQ ID NO: 7805 - RNA, 41 nt, synthetic construct
  source 1..41: mol_type = other RNA
cggaggggccatccacagtcctctcggtggcagtgatggca

SEQ ID NO: 7806 - RNA, 41 nt, synthetic construct
  source 1..41: mol_type = other RNA
acagtcctctcggtggcggtgatggcatggactgtggtcat

SEQ ID NO: 7807 - RNA, 41 nt, synthetic construct
  source 1..41: mol_type = other RNA
acgccacagtttcccggaggggccattcacagtcttctgga

SEQ ID NO: 7808 - RNA, 41 nt, synthetic construct
  source 1..41: mol_type = other RNA
cggaggggccattcaaagtcccctgggtggcagtgatggca

SEQ ID NO: 7809 - RNA, 41 nt, synthetic construct
  source 1..41: mol_type = other RNA
cggaggggccattcacggtcctctgggtggcagtgatggca

SEQ ID NO: 7810 - RNA, 41 nt, synthetic construct
  source 1..41: mol_type = other RNA
ccagtcctctcggtgatggtgatggcatggactgtggtcat

SEQ ID NO: 7811 - RNA, 41 nt, synthetic construct
  source 1..41: mol_type = other RNA
acagtcctctgggtggcaatgatggcatggactgtggtcat

SEQ ID NO: 7812 - RNA, 41 nt, synthetic construct
  source 1..41: mol_type = other RNA
accactctctgggtggcagtgatggcatggactgtggtcat

SEQ ID NO: 7813 - RNA, 41 nt, synthetic construct
  source 1..41: mol_type = other RNA
acggtcctctgggtggctgtgatggcatggactgtggtcat

SEQ ID NO: 7814 - RNA, 41 nt, synthetic construct
  source 1..41: mol_type = other RNA
cggaggggccctcaacagtcctctgggtggcagtgatggca

SEQ ID NO: 7815 - RNA, 40 nt, synthetic construct
  source 1..40: mol_type = other RNA
cgctcctctgggtgtcactgatggcatggactgtggtcat

SEQ ID NO: 7816 - RNA, 41 nt, synthetic construct
  source 1..41: mol_type = other RNA
cggaggggccatccacagtcttctaggtggcagtgatggca

SEQ ID NO: 7817 - RNA, 41 nt, synthetic construct
  source 1..41: mol_type = other RNA
cggaggggccatccacagtcctatgggtggaagtgatggca

SEQ ID NO: 7818 - RNA, 41 nt, synthetic construct
  source 1..41: mol_type = other RNA
cggaggggccatccatggttctctgagtggcagtgatggca

SEQ ID NO: 7819 - RNA, 41 nt, synthetic construct
  source 1..41: mol_type = other RNA
cggaggggccatacccagtcctctgggtggaagtgatggca

SEQ ID NO: 7820 - RNA, 41 nt, synthetic construct
  source 1..41: mol_type = other RNA
cggaggggccgtccacaatcctctgggtggcagtgatggca

SEQ ID NO: 7821 - RNA, 41 nt, synthetic construct
  source 1..41: mol_type = other RNA
acgccacagtttcccggaggggccatccacagtcgtctggg

SEQ ID NO: 7822 - RNA, 41 nt, synthetic construct
  source 1..41: mol_type = other RNA
acgccacagtttcccggaggggccatctgtggccttctggg

SEQ ID NO: 7823 - RNA, 48 nt, synthetic construct
  source 1..48: mol_type = other RNA
acgccacagtttcccggaggggtcatacactatcctctagccaagagg

SEQ ID NO: 7824 - RNA, 41 nt, synthetic construct
  source 1..41: mol_type = other RNA
acgccacagtttcccggaggggacatccccagactcctggg

SEQ ID NO: 7825 - RNA, 41 nt, synthetic construct
  source 1..41: mol_type = other RNA
acgccacagtttcccggaggggacatccccagtcctctcgg

SEQ ID NO: 7826 - RNA, 41 nt, synthetic construct
  source 1..41: mol_type = other RNA
acagtcctctacgtggcagtgatggcatggactgtggtcat

SEQ ID NO: 7827 - RNA, 41 nt, synthetic construct
  source 1..41: mol_type = other RNA
ccagtcctctgggtgatactgatggcatggactgtggtcat

SEQ ID NO: 7828 - RNA, 49 nt, synthetic construct
  source 1..49: mol_type = other RNA
gcaggcctctgacgtgacaggttgagacgatggcatggactgtggtcat

SEQ ID NO: 7829 - RNA, 41 nt, synthetic construct
  source 1..41: mol_type = other RNA
cggaggggccgtaaaccgtcctctgcgtggcagtgatggca

SEQ ID NO: 7830 - RNA, 41 nt, synthetic construct
  source 1..41: mol_type = other RNA
cggaggggccatccacagccctctgggtggcagtgatggca

SEQ ID NO: 7831 - RNA, 41 nt, synthetic construct
  source 1..41: mol_type = other RNA
acaatcatctgggtgggagtcatggcatggactgtggtcat

SEQ ID NO: 7832 - RNA, 40 nt, synthetic construct
  source 1..40: mol_type = other RNA
acgccacagtttcccggaggggccatctacaatccttggg

SEQ ID NO: 7833 - RNA, 41 nt, synthetic construct
  source 1..41: mol_type = other RNA
acattcctctaggtgggagtgatggcatggactgtggtcat

SEQ ID NO: 7834 - RNA, 40 nt, synthetic construct
  source 1..40: mol_type = other RNA
acagtcctctgggtggagtgatggcatggactgtggtcat

SEQ ID NO: 7835 - RNA, 41 nt, synthetic construct
  source 1..41: mol_type = other RNA
actgtcctctgcgtaaacgtaatggcatggactgtggtcat

SEQ ID NO: 7836 - RNA, 41 nt, synthetic construct
  source 1..41: mol_type = other RNA
acgccacagtttcccggaggggccatccacagacttctggg

SEQ ID NO: 7837 - RNA, 41 nt, synthetic construct
  source 1..41: mol_type = other RNA
cggaggggccatccccagacccctgggtcacagtgatggca

SEQ ID NO: 7838 - RNA, 41 nt, synthetic construct
  source 1..41: mol_type = other RNA
cggaggggccaactgcagtcttctcggtagtagtgatggca

SEQ ID NO: 7839 - RNA, 41 nt, synthetic construct
  source 1..41: mol_type = other RNA
acagccctctgggtggcagtgatggcatggactgtggtcat

SEQ ID NO: 7840 - RNA, 41 nt, synthetic construct
  source 1..41: mol_type = other RNA
cggaggggccatccacagtcctctgggtggtagtgatggca

SEQ ID NO: 7841 - RNA, 40 nt, synthetic construct
  source 1..40: mol_type = other RNA
acagtcctctgaggttggcgatggcatggactgtggtcat

SEQ ID NO: 7842 - RNA, 40 nt, synthetic construct
  source 1..40: mol_type = other RNA
cggaggggccctgcacagtcttctgggtccagtgatggca

SEQ ID NO: 7843 - RNA, 41 nt, synthetic construct
  source 1..41: mol_type = other RNA
acactcctctgggtggaagtgatggcatggactgtggtcat

SEQ ID NO: 7844 - RNA, 41 nt, synthetic construct
  source 1..41: mol_type = other RNA
acgccacagtttcccggaggggccatccacagccttctggg

SEQ ID NO: 7845 - RNA, 41 nt, synthetic construct
  source 1..41: mol_type = other RNA
acagtcttctgggtgatagtgatggcatggactgtggtcat

SEQ ID NO: 7846 - RNA, 41 nt, synthetic construct
  source 1..41: mol_type = other RNA
acagtcctctgggtggcagtgatggcatggactgtggtcat

SEQ ID NO: 7847 - RNA, 41 nt, synthetic construct
  source 1..41: mol_type = other RNA
cggaggggccacccacagtcctttcggtggcagtgatggca

SEQ ID NO: 7848 - RNA, 41 nt, synthetic construct
  source 1..41: mol_type = other RNA
cggaggggccatccacagtcttctgggaaggagtgatggca

SEQ ID NO: 7849 - RNA, 41 nt, synthetic construct
  source 1..41: mol_type = other RNA
acagtcctccgggcggcaatgatggcatggactgtggtcat

SEQ ID NO: 7850 - RNA, 41 nt, synthetic construct
  source 1..41: mol_type = other RNA
acagtcctctgggtggtggtgatggcatggactgtggtcat

SEQ ID NO: 7851 - RNA, 41 nt, synthetic construct
  source 1..41: mol_type = other RNA
acagtcgtctgggtggaattgatggcatggactgtggtcat

SEQ ID NO: 7852 - RNA, 41 nt, synthetic construct
  source 1..41: mol_type = other RNA
acagtcttctaggtggcaatgatggcatggactgtggtcat

SEQ ID NO: 7853 - RNA, 41 nt, synthetic construct
  source 1..41: mol_type = other RNA
cggaggggccatccatagttctctgggtggcagtgatggca

SEQ ID NO: 7854 - RNA, 41 nt, synthetic construct
  source 1..41: mol_type = other RNA
atagttctctgggtggcggtgatggcatggactgtggtcat

SEQ ID NO: 7855 - RNA, 41 nt, synthetic construct
  source 1..41: mol_type = other RNA
acgccacagtttcccggaggggacatccacagacccctggg

SEQ ID NO: 7856 - RNA, 41 nt, synthetic construct
  source 1..41: mol_type = other RNA
cggaggggccatccaccactctctgggtggcagtgatggca

SEQ ID NO: 7857 - RNA, 41 nt, synthetic construct
  source 1..41: mol_type = other RNA
gcagtcatctggtcgcaagtgatggcatggactgtggtcat

SEQ ID NO: 7858 - RNA, 41 nt, synthetic construct
  source 1..41: mol_type = other RNA
cggaggggccatgcacagttctctgggtggcagtgatggca

SEQ ID NO: 7859 - RNA, 41 nt, synthetic construct
  source 1..41: mol_type = other RNA
actgtcctctaggtggcagtgatggcatggactgtggtcat

SEQ ID NO: 7860 - RNA, 41 nt, synthetic construct
  source 1..41: mol_type = other RNA
acgccacagtttcccggaggggacatccacagtcctctggg

SEQ ID NO: 7861 - RNA, 41 nt, synthetic construct
  source 1..41: mol_type = other RNA
cggaggggccatccgcagtcctctgtgtggcagtgatggca

SEQ ID NO: 7862 - RNA, 41 nt, synthetic construct
  source 1..41: mol_type = other RNA
acgccacagtttcccggaggggcatctcaaaggcttctggc

SEQ ID NO: 7863 - RNA, 41 nt, synthetic construct
  source 1..41: mol_type = other RNA
cggaggggccgtcaacagtcctctgggtggcagtgatggca

SEQ ID NO: 7864 - RNA, 52 nt, synthetic construct
  source 1..52: mol_type = other RNA
acgccacagtttcccggaggggtcccaaggtgaccatccagagtccttctgg

SEQ ID NO: 7865 - RNA, 41 nt, synthetic construct
  source 1..41: mol_type = other RNA
cggaggggccatccacagtcctctgggtggaagtgatggca

SEQ ID NO: 7866 - RNA, 41 nt, synthetic construct
  source 1..41: mol_type = other RNA
gcagtcctctggtcgcaagtgatggcatggactgtggtcat

SEQ ID NO: 7867 - RNA, 41 nt, synthetic construct
  source 1..41: mol_type = other RNA
cggaggggccatctgtggccttctgggtggcagtgatggca

SEQ ID NO: 7868 - RNA, 41 nt, synthetic construct
  source 1..41: mol_type = other RNA
cggaggggccatcgactgtcttctaggtggcagtgatggca

SEQ ID NO: 7869 - RNA, 41 nt, synthetic construct
  source 1..41: mol_type = other RNA
cggaggggccatccccagtcctctgggtggcagtgatggca

SEQ ID NO: 7870 - RNA, 41 nt, synthetic construct
  source 1..41: mol_type = other RNA
atagtctcgtgcgcggcagtgatggcatggactgtggtcat

SEQ ID NO: 7871 - RNA, 41 nt, synthetic construct
  source 1..41: mol_type = other RNA
cggaggggccatccgcaggcctatggggggcagtgatggca

SEQ ID NO: 7872 - RNA, 41 nt, synthetic construct
  source 1..41: mol_type = other RNA
cggaggggcccttgacagtcctctgggtggcagtgatggca

SEQ ID NO: 7873 - RNA, 41 nt, synthetic construct
  source 1..41: mol_type = other RNA
cggaggggccatccacagtcctccgggcggcagtgatggca

SEQ ID NO: 7874 - RNA, 41 nt, synthetic construct
  source 1..41: mol_type = other RNA
acgccacagtttcccggaggggccatccacagtcctctgag

SEQ ID NO: 7875 - RNA, 40 nt, synthetic construct
  source 1..40: mol_type = other RNA
acatctcctaggtggcagtgatggcatggactgtggtcat

SEQ ID NO: 7876 - RNA, 41 nt, synthetic construct
  source 1..41: mol_type = other RNA
acagtcttctgggcggcagtgatggcatggactgtggtcat

SEQ ID NO: 7877 - RNA, 41 nt, synthetic construct
  source 1..41: mol_type = other RNA
atggttctctgagtggctgtgatggcatggactgtggtcat

SEQ ID NO: 7878 - RNA, 44 nt, synthetic construct
  source 1..44: mol_type = other RNA
acgccacagtttcccggaggggacataaacagttcgcctctgcg

SEQ ID NO: 7879 - RNA, 41 nt, synthetic construct
  source 1..41: mol_type = other RNA
caagtcctctcggcggcagtgatggcatggactgtggtcat

SEQ ID NO: 7880 - RNA, 39 nt, synthetic construct
  source 1..39: mol_type = other RNA
agtcctatgggtgacagtgatggcatggactgtggtcat

SEQ ID NO: 7881 - RNA, 41 nt, synthetic construct
  source 1..41: mol_type = other RNA
acgccacagtttcccggaggggccatccatagtcgtctggg

SEQ ID NO: 7882 - RNA, 41 nt, synthetic construct
  source 1..41: mol_type = other RNA
cggaggggccatccacagtcttctgcgtagcagtgatggca

SEQ ID NO: 7883 - RNA, 41 nt, synthetic construct
  source 1..41: mol_type = other RNA
cggaggggccatccacagtcctcggggtggcagtgatggca

SEQ ID NO: 7884 - RNA, 41 nt, synthetic construct
  source 1..41: mol_type = other RNA
cggaggggccaaatacagtcctctgggtggcagtgatggca

SEQ ID NO: 7885 - RNA, 41 nt, synthetic construct
  source 1..41: mol_type = other RNA
cggaggggccatccacaggcctctgggtggcagtgatggca

SEQ ID NO: 7886 - RNA, 41 nt, synthetic construct
  source 1..41: mol_type = other RNA
acgccacagtttcccggaggggccatccccagtcctctaag

SEQ ID NO: 7887 - RNA, 41 nt, synthetic construct
  source 1..41: mol_type = other RNA
acagtcctctgcgtggcagtgatggcatggactgtggtcat

SEQ ID NO: 7888 - RNA, 41 nt, synthetic construct
  source 1..41: mol_type = other RNA
acgccacagtttcccggaggggccaactgcagtcctcgagg

SEQ ID NO: 7889 - RNA, 41 nt, synthetic construct
  source 1..41: mol_type = other RNA
aaagtcccctgggtggcagtgatggcatggactgtggtcat

SEQ ID NO: 7890 - RNA, 47 nt, synthetic construct
  source 1..47: mol_type = other RNA
cggaggggccatatactatcttctagccaagaggttcagtgatggca

SEQ ID NO: 7891 - RNA, 41 nt, synthetic construct
  source 1..41: mol_type = other RNA
acgccacagtttcccggaggggccaactgcagtcttctcgg

SEQ ID NO: 7892 - RNA, 41 nt, synthetic construct
  source 1..41: mol_type = other RNA
acgccacagtttcccggaggggccatccacagtctcctggg

SEQ ID NO: 7893 - RNA, 41 nt, synthetic construct
  source 1..41: mol_type = other RNA
cggaggggccatccaccactttctgggtggcagtgatggca

SEQ ID NO: 7894 - RNA, 38 nt, synthetic construct
  source 1..38: mol_type = other RNA
atagtcctctgcgccgtgatggcatggactgtggtcat

SEQ ID NO: 7895 - RNA, 41 nt, synthetic construct
  source 1..41: mol_type = other RNA
acagccttctgggtggcagtgatggcatggactgtggtcat

SEQ ID NO: 7896 - RNA, 41 nt, synthetic construct
  source 1..41: mol_type = other RNA
acagtctcctgggtggcagtgatggcatggactgtggtcat

SEQ ID NO: 7897 - RNA, 41 nt, synthetic construct
  source 1..41: mol_type = other RNA
accgtcctctgcgtggcagtgatggcatggactgtggtcat

SEQ ID NO: 7898 - RNA, 41 nt, synthetic construct
  source 1..41: mol_type = other RNA
acgccacagtttcccggaggggccatccacagacctctggg

SEQ ID NO: 7899 - RNA, 38 nt, synthetic construct
  source 1..38: mol_type = other RNA
acagtccttgggttgcgaatggcatggactgtggtcat

SEQ ID NO: 7900 - RNA, 41 nt, synthetic construct
  source 1..41: mol_type = other RNA
aaagtcctctgggtggcagtgatggcatggactgtggtcat

SEQ ID NO: 7901 - RNA, 41 nt, synthetic construct
  source 1..41: mol_type = other RNA
acagccttctgggtggcagtcatggcatggactgtggtcat

SEQ ID NO: 7902 - RNA, 41 nt, synthetic construct
  source 1..41: mol_type = other RNA
acactcctctgggaggcagtgatggcatggactgtggtcat

SEQ ID NO: 7903 - RNA, 43 nt, synthetic construct
  source 1..43: mol_type = other RNA
tctgtcctcttggcagggcagtaatggcatggactgtggtcat

SEQ ID NO: 7904 - RNA, 41 nt, synthetic construct
  source 1..41: mol_type = other RNA
acagtcatctgggtggcagtgatggcatggactgtggtcat

SEQ ID NO: 7905 - RNA, 41 nt, synthetic construct
  source 1..41: mol_type = other RNA
acagtcttctggggggcatggatggcatggactgtggtcat

SEQ ID NO: 7906 - RNA, 41 nt, synthetic construct
  source 1..41: mol_type = other RNA
acggcttcctgggtggcagtgatggcatggactgtggtcat

SEQ ID NO: 7907 - RNA, 42 nt, synthetic construct
  source 1..42: mol_type = other RNA
acgccacagtttcccggagggagccatgcacagtccttcggg

SEQ ID NO: 7908 - RNA, 41 nt, synthetic construct
  source 1..41: mol_type = other RNA
acagccttctggatggctgtgatggcatggactgtggtcat

SEQ ID NO: 7909 - RNA, 41 nt, synthetic construct
  source 1..41: mol_type = other RNA
acactcctctgggtggcaggaatggcatggactgtggtcat

SEQ ID NO: 7910 - RNA, 41 nt, synthetic construct
  source 1..41: mol_type = other RNA
acagccttctgggcggcagtgatggcatggactgtggtcat

SEQ ID NO: 7911 - RNA, 41 nt, synthetic construct
  source 1..41: mol_type = other RNA
acgccacagtttcccggaggggccatccacagtcccatcgg

SEQ ID NO: 7912 - RNA, 41 nt, synthetic construct
  source 1..41: mol_type = other RNA
acgccacagtttcccggaggggccatccacagtcctctcgg

SEQ ID NO: 7913 - RNA, 41 nt, synthetic construct
  source 1..41: mol_type = other RNA
cggaggggccatccaccatcccctaggtggcagtgatggca

SEQ ID NO: 7914 - RNA, 41 nt, synthetic construct
  source 1..41: mol_type = other RNA
acagtcttctgggaaggagtgatggcatggactgtggtcat

SEQ ID NO: 7915 - RNA, 41 nt, synthetic construct
  source 1..41: mol_type = other RNA
cggaggggccatccacagtcctttgggtagcagtgatggca

SEQ ID NO: 7916 - RNA, 41 nt, synthetic construct
  source 1..41: mol_type = other RNA
acgccacagtttcccggaggggccatcgactgtcttctagg

SEQ ID NO: 7917 - RNA, 43 nt, synthetic construct
  source 1..43: mol_type = other RNA
cggaggggccatccacggtctcctgggtcaagcagtgatggca

SEQ ID NO: 7918 - RNA, 40 nt, synthetic construct
  source 1..40: mol_type = other RNA
cggaggggccatctcacagtcttggttggcagtgatggca

SEQ ID NO: 7919 - RNA, 41 nt, synthetic construct
  source 1..41: mol_type = other RNA
cggaggggccatttccagtcctctgggtggcagtgatggca

SEQ ID NO: 7920 - RNA, 41 nt, synthetic construct
  source 1..41: mol_type = other RNA
acgccacagtttcccggaggagtcatccgcaggcttatggg

SEQ ID NO: 7921 - RNA, 41 nt, synthetic construct
  source 1..41: mol_type = other RNA
cggaggggccatccacagtcttctgggtggtagtgatggca

SEQ ID NO: 7922 - RNA, 39 nt, synthetic construct
  source 1..39: mol_type = other RNA
acagtcctgggtggcagtgatggcatggactgtggtcat

SEQ ID NO: 7923 - RNA, 41 nt, synthetic construct
  source 1..41: mol_type = other RNA
acagtcccatgggtggcagtgatggcatggactgtggtcat

SEQ ID NO: 7924 - RNA, 41 nt, synthetic construct
  source 1..41: mol_type = other RNA
cggaggggccttccacagtctcatgggtggcagtgatggca

SEQ ID NO: 7925 - RNA, 41 nt, synthetic construct
  source 1..41: mol_type = other RNA
acgccacagtttcccggaggggccatccccagtcttctcgg

SEQ ID NO: 7926 - RNA, 41 nt, synthetic construct
  source 1..41: mol_type = other RNA
acgccacagtttcccggaggggccatccccagtcctctcgg

SEQ ID NO: 7927 - RNA, 41 nt, synthetic construct
  source 1..41: mol_type = other RNA
ccagtcctctcggtagcagtgatggcatggactgtggtcat

SEQ ID NO: 7928 - RNA, 44 nt, synthetic construct
  source 1..44: mol_type = other RNA
acagtttgcctctgcgtggcagtgatggcatggactgtggtcat

SEQ ID NO: 7929 - RNA, 41 nt, synthetic construct
  source 1..41: mol_type = other RNA
acaatccttgggttggcagtgatggcatggactgtggtcat

SEQ ID NO: 7930 - RNA, 41 nt, synthetic construct
  source 1..41: mol_type = other RNA
acagtcctttggttggcagtgatggcatggactgtggtcat

SEQ ID NO: 7931 - RNA, 41 nt, synthetic construct
  source 1..41: mol_type = other RNA
acagtcctactggtggcagtgatggcatggactgtggtcat

SEQ ID NO: 7932 - RNA, 41 nt, synthetic construct
  source 1..41: mol_type = other RNA
ccagacccctgggtctcagtgatggcatggactgtggtcat

SEQ ID NO: 7933 - RNA, 41 nt, synthetic construct
  source 1..41: mol_type = other RNA
acagtcttctacgtggcagtgatggcatggactgtggtcat

SEQ ID NO: 7934 - RNA, 40 nt, synthetic construct
  source 1..40: mol_type = other RNA
atagtctctgggtggcagagatggcatggactgtggtcat

SEQ ID NO: 7935 - RNA, 41 nt, synthetic construct
  source 1..41: mol_type = other RNA
cggaggggccatccacagacttctgggtagcagtgatggca

SEQ ID NO: 7936 - RNA, 41 nt, synthetic construct
  source 1..41: mol_type = other RNA
gcagtcttctgagtggcagtgatggcatggactgtggtcat

SEQ ID NO: 7937 - RNA, 41 nt, synthetic construct
  source 1..41: mol_type = other RNA
acgccacagtttcccggaggggtcatccacagtcttctagg

SEQ ID NO: 7938 - RNA, 41 nt, synthetic construct
  source 1..41: mol_type = other RNA
acactcctctgggtggcagtaatggcatggactgtggtcat

SEQ ID NO: 7939 - RNA, 38 nt, synthetic construct
  source 1..38: mol_type = other RNA
acagtccttgggttgcgtatggcatggactgtggtcat

SEQ ID NO: 7940 - RNA, 41 nt, synthetic construct
  source 1..41: mol_type = other RNA
cggaggggccctccacggcttcctgggtggcagtgatggca

SEQ ID NO: 7941 - RNA, 41 nt, synthetic construct
  source 1..41: mol_type = other RNA
accatcccctaggtggcagtgatggcatggactgtggtcat

SEQ ID NO: 7942 - RNA, 42 nt, synthetic construct
  source 1..42: mol_type = other RNA
acgccacagtttcccggagggagccatgcacagtccctcggg

SEQ ID NO: 7943 - RNA, 41 nt, synthetic construct
  source 1..41: mol_type = other RNA
acagtcctccgggtagcagtgatggcatggactgtggtcat

SEQ ID NO: 7944 - RNA, 44 nt, synthetic construct
  source 1..44: mol_type = other RNA
acgccacagtttcccggagggccatccacatttggttctctggg

SEQ ID NO: 7945 - RNA, 41 nt, synthetic construct
  source 1..41: mol_type = other RNA
ccactcatctaggtggcaggaatggcatggactgtggtcat

SEQ ID NO: 7946 - RNA, 39 nt, synthetic construct
  source 1..39: mol_type = other RNA
atagttctgggtggcagagatggcatggactgtggtcat

SEQ ID NO: 7947 - RNA, 40 nt, synthetic construct
  source 1..40: mol_type = other RNA
acagtccctgggtggcagtgatggcatggactgtggtcat

SEQ ID NO: 7948 - RNA, 41 nt, synthetic construct
  source 1..41: mol_type = other RNA
acagtgctctgggtggcggtgatggcatggactgtggtcat

SEQ ID NO: 7949 - RNA, 41 nt, synthetic construct
  source 1..41: mol_type = other RNA
acgccacagtttcccggaggggacatccacagactcctggg

SEQ ID NO: 7950 - RNA, 41 nt, synthetic construct
  source 1..41: mol_type = other RNA
acagtcttatgggtggaaatgatggcatggactgtggtcat

SEQ ID NO: 7951 - RNA, 45 nt, synthetic construct
  source 1..45: mol_type = other RNA
acgccacagtttcccggaggggccatcatgccacagtcccgtggg

SEQ ID NO: 7952 - RNA, 41 nt, synthetic construct
  source 1..41: mol_type = other RNA
cggaggggccatgtacggtccccagggtggcagtgatggca

SEQ ID NO: 7953 - RNA, 44 nt, synthetic construct
  source 1..44: mol_type = other RNA
acagttcgcctctgcgtggcagtgatggcatggactgtggtcat

SEQ ID NO: 7954 - RNA, 41 nt, synthetic construct
  source 1..41: mol_type = other RNA
acggttccatgggtgccagtgatggcatggactgtggtcat

SEQ ID NO: 7955 - RNA, 40 nt, synthetic construct
  source 1..40: mol_type = other RNA
acatcccctaggtggcggtgatggcatggactgtggtcat

SEQ ID NO: 7956 - RNA, 41 nt, synthetic construct
  source 1..41: mol_type = other RNA
acgccacagtttcccggaggggccacccacagtcctcttgg

SEQ ID NO: 7957 - RNA, 48 nt, synthetic construct
  source 1..48: mol_type = other RNA
acgccacagtttcccggaggggtcatacactatcttcttgccaagagg

SEQ ID NO: 7958 - RNA, 41 nt, synthetic construct
  source 1..41: mol_type = other RNA
cggaggggccatcggctgtcccctaggtggcagtgatggca

SEQ ID NO: 7959 - RNA, 43 nt, synthetic construct
  source 1..43: mol_type = other RNA
actgccctctgggtaaggcagtaatggcatggactgtggtcat

SEQ ID NO: 7960 - RNA, 39 nt, synthetic construct
  source 1..39: mol_type = other RNA
cggaggggccatatatagttctgggtggcagtgatggca

SEQ ID NO: 7961 - RNA, 41 nt, synthetic construct
  source 1..41: mol_type = other RNA
gcagtcctctgggtagcagtaatggcatggactgtggtcat

SEQ ID NO: 7962 - RNA, 40 nt, synthetic construct
  source 1..40: mol_type = other RNA
cggaggggccatccacagtccctgggtggcagtgatggca

SEQ ID NO: 7963 - RNA, 41 nt, synthetic construct
  source 1..41: mol_type = other RNA
cggaggggccatccacagactcctgggtcacagtgatggca

SEQ ID NO: 7964 - RNA, 41 nt, synthetic construct
  source 1..41: mol_type = other RNA
acagccctctgggtggcagtcatggcatggactgtggtcat

SEQ ID NO: 7965 - RNA, 41 nt, synthetic construct
  source 1..41: mol_type = other RNA
gtggccctctgggtggctgtgatggcatggactgtggtcat

SEQ ID NO: 7966 - RNA, 41 nt, synthetic construct
  source 1..41: mol_type = other RNA
acagtcttttggttggcagtgatggcatggactgtggtcat

SEQ ID NO: 7967 - RNA, 41 nt, synthetic construct
  source 1..41: mol_type = other RNA
acgccacagtttcccggaggggccatcctctgtcctcttgg

SEQ ID NO: 7968 - RNA, 41 nt, synthetic construct
  source 1..41: mol_type = other RNA
agagtccctctggtggcagtgatggcatggactgtggtcat

SEQ ID NO: 7969 - RNA, 41 nt, synthetic construct
  source 1..41: mol_type = other RNA
acagtcctttcggtggccgtgatggcatggactgtggtcat

SEQ ID NO: 7970 - RNA, 41 nt, synthetic construct
  source 1..41: mol_type = other RNA
gcaggcttatggggggcaggtatggcatggactgtggtcat

SEQ ID NO: 7971 - RNA, 41 nt, synthetic construct
  source 1..41: mol_type = other RNA
cggaggggccatccgcaggcttatggggggcagtgatggca

SEQ ID NO: 7972 - RNA, 41 nt, synthetic construct
  source 1..41: mol_type = other RNA
cggaggggccaatccagcacctctggatggcagtgatggca

SEQ ID NO: 7973 - RNA, 41 nt, synthetic construct
  source 1..41: mol_type = other RNA
gctgtcccctaggtggcagtgatggcatggactgtggtcat

SEQ ID NO: 7974 - RNA, 41 nt, synthetic construct
  source 1..41: mol_type = other RNA
acagtcctcggggtggcagtgatggcatggactgtggtcat

SEQ ID NO: 7975 - RNA, 41 nt, synthetic construct
  source 1..41: mol_type = other RNA
acgccacagtttcccggaggggaactccacggctccctggg

SEQ ID NO: 7976 - RNA, 41 nt, synthetic construct
  source 1..41: mol_type = other RNA
atagtgtcctgcgcggcagtgatggcatggactgtggtcat

SEQ ID NO: 7977 - RNA, 43 nt, synthetic construct
  source 1..43: mol_type = other RNA
acggtcccctgggtcaagcagtgatggcatggactgtggtcat

SEQ ID NO: 7978 - RNA, 38 nt, synthetic construct
  source 1..38: mol_type = other RNA
acgccacagtttcccggaggggccatcagtcctatggg

SEQ ID NO: 7979 - RNA, 41 nt, synthetic construct
  source 1..41: mol_type = other RNA
acactcttctgggtggaagtgatggcatggactgtggtcat

SEQ ID NO: 7980 - RNA, 41 nt, synthetic construct
  source 1..41: mol_type = other RNA
acactcgtctgggtggcaggaatggcatggactgtggtcat

SEQ ID NO: 7981 - RNA, 41 nt, synthetic construct
  source 1..41: mol_type = other RNA
cggaggggccatccccagactcctgggtcacagtgatggca

SEQ ID NO: 7982 - RNA, 47 nt, synthetic construct
  source 1..47: mol_type = other RNA
gcagttctcatgggtcagcctggcacgatggcatggactgtggtcat

SEQ ID NO: 7983 - RNA, 49 nt, synthetic construct
  source 1..49: mol_type = other RNA
cggaggggccatcaagcagttcccatgggtcagcctggcagtgatggca

SEQ ID NO: 7984 - RNA, 41 nt, synthetic construct
  source 1..41: mol_type = other RNA
gcagtcctctgagtggcagtgatggcatggactgtggtcat

SEQ ID NO: 7985 - RNA, 41 nt, synthetic construct
  source 1..41: mol_type = other RNA
aaaggcctttggctggcagtgatggcatggactgtggtcat

SEQ ID NO: 7986 - RNA, 41 nt, synthetic construct
  source 1..41: mol_type = other RNA
acagtcctctgggtagcagtgatggcatggactgtggtcat

SEQ ID NO: 7987 - RNA, 41 nt, synthetic construct
  source 1..41: mol_type = other RNA
gctgtctcctaggtggcagtgatggcatggactgtggtcat

SEQ ID NO: 7988 - RNA, 38 nt, synthetic construct
  source 1..38: mol_type = other RNA
cggaggggcctcacagtccttggttggcagtgatggca

SEQ ID NO: 7989 - RNA, 41 nt, synthetic construct
  source 1..41: mol_type = other RNA
accgtcccatgggtggcgatgatggcatggactgtggtcat

SEQ ID NO: 7990 - RNA, 41 nt, synthetic construct
  source 1..41: mol_type = other RNA
acgccacagtttcccggaggggccatccaccactctctggg

SEQ ID NO: 7991 - RNA, 40 nt, synthetic construct
  source 1..40: mol_type = other RNA
cggaggggccgttcacagtccttgggtggcagtgatggca

SEQ ID NO: 7992 - RNA, 41 nt, synthetic construct
  source 1..41: mol_type = other RNA
acagtcttttgggtagcagtgatggcatggactgtggtcat

SEQ ID NO: 7993 - RNA, 41 nt, synthetic construct
  source 1..41: mol_type = other RNA
actgtcttctaggtggcagtgatggcatggactgtggtcat

SEQ ID NO: 7994 - RNA, 40 nt, synthetic construct
  source 1..40: mol_type = other RNA
acatcccctaggtggcagtgatggcatggactgtggtcat

SEQ ID NO: 7995 - RNA, 41 nt, synthetic construct
  source 1..41: mol_type = other RNA
acaggtcctctaggtggtatgatggcatggactgtggtcat

SEQ ID NO: 7996 - RNA, 40 nt, synthetic construct
  source 1..40: mol_type = other RNA
acagtcttctgggtccggtgatggcatggactgtggtcat

SEQ ID NO: 7997 - RNA, 39 nt, synthetic construct
  source 1..39: mol_type = other RNA
acagtcactgttggcagtgatggcatggactgtggtcat

SEQ ID NO: 7998 - RNA, 39 nt, synthetic construct
  source 1..39: mol_type = other RNA
acagtcttggttggcagtgatggcatggactgtggtcat

SEQ ID NO: 7999 - RNA, 41 nt, synthetic construct
  source 1..41: mol_type = other RNA
gcaggcctatggggggcaggtatggcatggactgtggtcat

SEQ ID NO: 8000 - RNA, 41 nt, synthetic construct
  source 1..41: mol_type = other RNA
agggtcctctaaactgcagtgatggcatggactgtggtcat

SEQ ID NO: 8001 - RNA, 41 nt, synthetic construct
  source 1..41: mol_type = other RNA
gcagtcttctcggtagtcgtgatggcatggactgtggtcat

SEQ ID NO: 8002 - RNA, 42 nt, synthetic construct
  source 1..42: mol_type = other RNA
acgccacagtttcccggaggggcatcaagcagttctcatggg

SEQ ID NO: 8003 - RNA, 41 nt, synthetic construct
  source 1..41: mol_type = other RNA
cggaggggccatccacagccttctgggcggcagtgatggca

SEQ ID NO: 8004 - RNA, 41 nt, synthetic construct
  source 1..41: mol_type = other RNA
acagacccctgggtcacagtgatggcatggactgtggtcat

SEQ ID NO: 8005 - RNA, 41 nt, synthetic construct
  source 1..41: mol_type = other RNA
gtggccttctgggtggctgtgatggcatggactgtggtcat

SEQ ID NO: 8006 - RNA, 41 nt, synthetic construct
  source 1..41: mol_type = other RNA
acgccacagtttcccggaggggccatctgcagtcctatggg

SEQ ID NO: 8007 - RNA, 41 nt, synthetic construct
  source 1..41: mol_type = other RNA
cggaggggccatcgcacatcccctaggtggcagtgatggca

SEQ ID NO: 8008 - RNA, 39 nt, synthetic construct
  source 1..39: mol_type = other RNA
acagtccctgttggcagtgatggcatggactgtggtcat

SEQ ID NO: 8009 - RNA, 41 nt, synthetic construct
  source 1..41: mol_type = other RNA
atagtcgtctgggtggccgtgatggcatggactgtggtcat

SEQ ID NO: 8010 - RNA, 40 nt, synthetic construct
  source 1..40: mol_type = other RNA
acagtcttctgggtacagtaatggcatggactgtggtcat

SEQ ID NO: 8011 - RNA, 40 nt, synthetic construct
  source 1..40: mol_type = other RNA
cggaggggccatcataccgtctctgggtgcagtgatggca

SEQ ID NO: 8012 - RNA, 40 nt, synthetic construct
  source 1..40: mol_type = other RNA
cggaggggccatatatagtctctgggtggcagtgatggca

SEQ ID NO: 8013 - RNA, 41 nt, synthetic construct
  source 1..41: mol_type = other RNA
acagtctcatgggtggcagtgatggcatggactgtggtcat

SEQ ID NO: 8014 - RNA, 41 nt, synthetic construct
  source 1..41: mol_type = other RNA
acagtcctatgggtggaaatgatggcatggactgtggtcat

SEQ ID NO: 8015 - RNA, 41 nt, synthetic construct
  source 1..41: mol_type = other RNA
acaggcctctgggtggcagtaatggcatggactgtggtcat

SEQ ID NO: 8016 - RNA, 39 nt, synthetic construct
  source 1..39: mol_type = other RNA
acagtcctggggggcagagatggcatggactgtggtcat

SEQ ID NO: 8017 - RNA, 41 nt, synthetic construct
  source 1..41: mol_type = other RNA
cggaggggccatctacaggtctctaggtggtagtgatggca

SEQ ID NO: 8018 - RNA, 41 nt, synthetic construct
  source 1..41: mol_type = other RNA
acgccacagtttcccggaggggaaatccacagtttcatggg

SEQ ID NO: 8019 - RNA, 41 nt, synthetic construct
  source 1..41: mol_type = other RNA
cggaggggccatgaacagtcctttggttggcagtgatggca

SEQ ID NO: 8020 - RNA, 41 nt, synthetic construct
  source 1..41: mol_type = other RNA
atagtcccgtgcgcggcagtgatggcatggactgtggtcat

SEQ ID NO: 8021 - RNA, 41 nt, synthetic construct
  source 1..41: mol_type = other RNA
agggtcctctaaacagcagtgatggcatggactgtggtcat

SEQ ID NO: 8022 - RNA, 47 nt, synthetic construct
  source 1..47: mol_type = other RNA
gcagttcccatgggtcagcctggcacgatggcatggactgtggtcat

SEQ ID NO: 8023 - RNA, 41 nt, synthetic construct
  source 1..41: mol_type = other RNA
acagtcttctgcgtagctgtaatggcatggactgtggtcat

SEQ ID NO: 8024 - RNA, 39 nt, synthetic construct
  source 1..39: mol_type = other RNA
acgccacagtttcccggaggggcaatacacagttctggg

SEQ ID NO: 8025 - RNA, 41 nt, synthetic construct
  source 1..41: mol_type = other RNA
acagacctctgggtagcagtgatggcatggactgtggtcat

SEQ ID NO: 8026 - RNA, 42 nt, synthetic construct
  source 1..42: mol_type = other RNA
gacagtcttctgtgtggaaggtatggcatggactgtggtcat

SEQ ID NO: 8027 - RNA, 39 nt, synthetic construct
  source 1..39: mol_type = other RNA
acgccacagtttcccggaggctttccacagtctcatggg

SEQ ID NO: 8028 - RNA, 41 nt, synthetic construct
  source 1..41: mol_type = other RNA
acagactcctgggtcacagtgatggcatggactgtggtcat

SEQ ID NO: 8029 - RNA, 46 nt, synthetic construct
  source 1..46: mol_type = other RNA
cggaggggccattcacatccgtcccatctcggtgggagtgatggca

SEQ ID NO: 8030 - RNA, 46 nt, synthetic construct
  source 1..46: mol_type = other RNA
cggaggggccattcacatccgtctcatctcggtgggagtgatggca

SEQ ID NO: 8031 - RNA, 40 nt, synthetic construct
  source 1..40: mol_type = other RNA
cggaggggccatatacagtccctggggggcagtgatggca

SEQ ID NO: 8032 - RNA, 42 nt, synthetic construct
  source 1..42: mol_type = other RNA
acgccacagtttcccggaggggaacatgtacagtccccaggg

SEQ ID NO: 8033 - RNA, 41 nt, synthetic construct
  source 1..41: mol_type = other RNA
cggaggggccatgcacagtccctcgggtggcagtgatggca

SEQ ID NO: 8034 - RNA, 41 nt, synthetic construct
  source 1..41: mol_type = other RNA
cggaggggccattcatagtgtcctgcgcggcagtgatggca

SEQ ID NO: 8035 - RNA, 41 nt, synthetic construct
  source 1..41: mol_type = other RNA
cggaggggccatgaacagtcttttggttggcagtgatggca

SEQ ID NO: 8036 - RNA, 41 nt, synthetic construct
  source 1..41: mol_type = other RNA
acgccacagtttcccggaggagccatcgcacatctcctagg

SEQ ID NO: 8037 - RNA, 42 nt, synthetic construct
  source 1..42: mol_type = other RNA
accgtctctgggtgcatttgtgatggcatggactgtggtcat

SEQ ID NO: 8038 - RNA, 39 nt, synthetic construct
  source 1..39: mol_type = other RNA
acagtcttggttggcagagatggcatggactgtggtcat

SEQ ID NO: 8039 - RNA, 37 nt, synthetic construct
  source 1..37: mol_type = other RNA
cggaggggcctcacagtcttggttggcagtgatggca

SEQ ID NO: 8040 - RNA, 49 nt, synthetic construct
  source 1..49: mol_type = other RNA
gcaggcttctgacgtgacaggttgagacgatggcatggactgtggtcat

SEQ ID NO: 8041 - RNA, 38 nt, synthetic construct
  source 1..38: mol_type = other RNA
acagtcttctaggtggagatggcatggactgtggtcat

SEQ ID NO: 8042 - RNA, 41 nt, synthetic construct
  source 1..41: mol_type = other RNA
acagtgttctgggtggcggtgatggcatggactgtggtcat

SEQ ID NO: 8043 - RNA, 41 nt, synthetic construct
  source 1..41: mol_type = other RNA
accactttctgggtggcagtgatggcatggactgtggtcat

SEQ ID NO: 8044 - RNA, 41 nt, synthetic construct
  source 1..41: mol_type = other RNA
cggaggggccatccaccatctcctaggtggcagtgatggca

SEQ ID NO: 8045 - RNA, 41 nt, synthetic construct
  source 1..41: mol_type = other RNA
acgccacagtttcccggaggggacatccaccatctcctagg

SEQ ID NO: 8046 - RNA, 41 nt, synthetic construct
  source 1..41: mol_type = other RNA
acagtctcgtgggtggaagtgatggcatggactgtggtcat

SEQ ID NO: 8047 - RNA, 41 nt, synthetic construct
  source 1..41: mol_type = other RNA
atggtcatctggctggccgtgatggcatggactgtggtcat

SEQ ID NO: 8048 - RNA, 40 nt, synthetic construct
  source 1..40: mol_type = other RNA
cggaggggccatcccagccctttgtggtacagtgatggca

SEQ ID NO: 8049 - RNA, 41 nt, synthetic construct
  source 1..41: mol_type = other RNA
acagtcccctgggtggcagtgatggcatggactgtggtcat

SEQ ID NO: 8050 - RNA, 41 nt, synthetic construct
  source 1..41: mol_type = other RNA
acagtcttctgggtagcagtgatggcatggactgtggtcat

SEQ ID NO: 8051 - RNA, 41 nt, synthetic construct
  source 1..41: mol_type = other RNA
cggaggggccatccatagtcccatcggtggtagtgatggca

SEQ ID NO: 8052 - RNA, 41 nt, synthetic construct
  source 1..41: mol_type = other RNA
acactcatctgggtggcagtgatggcatggactgtggtcat

SEQ ID NO: 8053 - RNA, 41 nt, synthetic construct
  source 1..41: mol_type = other RNA
cggaggggccatccacagtcttatgggtggaagtgatggca

SEQ ID NO: 8054 - RNA, 40 nt, synthetic construct
  source 1..40: mol_type = other RNA
acgccacagtttcccggaggggccatccacagtccttggg

SEQ ID NO: 8055 - RNA, 40 nt, synthetic construct
  source 1..40: mol_type = other RNA
acgccacagtttcccggaggggacatacacagtccctggg

SEQ ID NO: 8056 - RNA, 41 nt, synthetic construct
  source 1..41: mol_type = other RNA
atagtgccctgcgcggcagtgatggcatggactgtggtcat

SEQ ID NO: 8057 - RNA, 42 nt, synthetic construct
  source 1..42: mol_type = other RNA
cggaggggccatctcaaaggcctttggctggcagtgatggca

SEQ ID NO: 8058 - RNA, 42 nt, synthetic construct
  source 1..42: mol_type = other RNA
cggaggggccatctcaaaggcttttggctggcagtgatggca

SEQ ID NO: 8059 - RNA, 41 nt, synthetic construct
  source 1..41: mol_type = other RNA
cggaggggccattcatagtctcgtgcgcggcagtgatggca

SEQ ID NO: 8060 - RNA, 41 nt, synthetic construct
  source 1..41: mol_type = other RNA
cggaggggccattcatagtcccgtgcgcggcagtgatggca

SEQ ID NO: 8061 - RNA, 40 nt, synthetic construct
  source 1..40: mol_type = other RNA
cggaggggccatctcacagtcactgttggcagtgatggca

SEQ ID NO: 8062 - RNA, 45 nt, synthetic construct
  source 1..45: mol_type = other RNA
cggaggggccatccacgtgaagttctctggaaggcagtgatggca

SEQ ID NO: 8063 - RNA, 41 nt, synthetic construct
  source 1..41: mol_type = other RNA
cggaggggccatccatagttgtctgggtggcagtgatggca

SEQ ID NO: 8064 - RNA, 41 nt, synthetic construct
  source 1..41: mol_type = other RNA
acgccacagtttcccggaggggccatccacagtcccctggg

SEQ ID NO: 8065 - RNA, 40 nt, synthetic construct
  source 1..40: mol_type = other RNA
acgccacagtttcccggaggggcaatacacagtctctggg

SEQ ID NO: 8066 - RNA, 41 nt, synthetic construct
  source 1..41: mol_type = other RNA
acaatcctctgggtggcagtgatggcatggactgtggtcat

SEQ ID NO: 8067 - RNA, 39 nt, synthetic construct
  source 1..39: mol_type = other RNA
cggaggggccatccacagtcctgggtggcagtgatggca

SEQ ID NO: 8068 - RNA, 41 nt, synthetic construct
  source 1..41: mol_type = other RNA
cggaggggccttccacagtcccatgggtggcagtgatggca

SEQ ID NO: 8069 - RNA, 40 nt, synthetic construct
  source 1..40: mol_type = other RNA
acagtccttgggtggcagtgatggcatggactgtggtcat

SEQ ID NO: 8070 - RNA, 41 nt, synthetic construct
  source 1..41: mol_type = other RNA
acactcctctgggtggcagtgatggcatggactgtggtcat

SEQ ID NO: 8071 - RNA, 41 nt, synthetic construct
  source 1..41: mol_type = other RNA
acagtcccgtgggtggaagtgatggcatggactgtggtcat

SEQ ID NO: 8072 - RNA, 45 nt, synthetic construct
  source 1..45: mol_type = other RNA
cggaggggccgtcatgccacagtctcgtgggtggaagtgatggca

SEQ ID NO: 8073 - RNA, 41 nt, synthetic construct
  source 1..41: mol_type = other RNA
cggaggggccatcacacatctcctaggtggcagtgatggca

SEQ ID NO: 8074 - RNA, 39 nt, synthetic construct
  source 1..39: mol_type = other RNA
cggaggggccatatacagtcctggggggcagtgatggca

SEQ ID NO: 8075 - RNA, 40 nt, synthetic construct
  source 1..40: mol_type = other RNA
acagtccctggggggcagagatggcatggactgtggtcat

SEQ ID NO: 8076 - RNA, 41 nt, synthetic construct
  source 1..41: mol_type = other RNA
acagtccttcgggtggcagtgatggcatggactgtggtcat

SEQ ID NO: 8077 - RNA, 41 nt, synthetic construct
  source 1..41: mol_type = other RNA
acgccacagtttcccggaggggtcatccacggtctcctggg

SEQ ID NO: 8078 - RNA, 41 nt, synthetic construct
  source 1..41: mol_type = other RNA
cggaggggccgtccacggtttcatgggtgccagtgatggca

SEQ ID NO: 8079 - RNA, 41 nt, synthetic construct
  source 1..41: mol_type = other RNA
cggaggggccatctgcagtcctatgggtggcagtgatggca

SEQ ID NO: 8080 - RNA, 41 nt, synthetic construct
  source 1..41: mol_type = other RNA
aaaggcttttggctggcagtgatggcatggactgtggtcat

SEQ ID NO: 8081 - RNA, 41 nt, synthetic construct
  source 1..41: mol_type = other RNA
ccagactcctgggtctcagtgatggcatggactgtggtcat

SEQ ID NO: 8082 - RNA, 40 nt, synthetic construct
  source 1..40: mol_type = other RNA
acagtccttggttggcagagatggcatggactgtggtcat

SEQ ID NO: 8083 - RNA, 38 nt, synthetic construct
  source 1..38: mol_type = other RNA
acgccacagtttcccggaggggagtcacagtccctggt

SEQ ID NO: 8084 - RNA, 41 nt, synthetic construct
  source 1..41: mol_type = other RNA
cggaggggccatccacagtcttctgggtggcagtgatggca

SEQ ID NO: 8085 - RNA, 41 nt, synthetic construct
  source 1..41: mol_type = other RNA
acaatcttctgggtggcagtgatggcatggactgtggtcat

SEQ ID NO: 8086 - RNA, 39 nt, synthetic construct
  source 1..39: mol_type = other RNA
acgccacagtttcccggaggctttccacagtcccatggg

SEQ ID NO: 8087 - RNA, 41 nt, synthetic construct
  source 1..41: mol_type = other RNA
cggaggggccctccacggctccctgggtggcagtgatggca

SEQ ID NO: 8088 - RNA, 41 nt, synthetic construct
  source 1..41: mol_type = other RNA
accatctcctaggtggcagtgatggcatggactgtggtcat

SEQ ID NO: 8089 - RNA, 41 nt, synthetic construct
  source 1..41: mol_type = other RNA
acactcgtctgggtggcagtgatggcatggactgtggtcat

SEQ ID NO: 8090 - RNA, 45 nt, synthetic construct
  source 1..45: mol_type = other RNA
acgccacagtttcccggaggggccatcatgccacagtctcgtggg

SEQ ID NO: 8091 - RNA, 41 nt, synthetic construct
  source 1..41: mol_type = other RNA
cggaggggccatcacacatcccctaggtggcagtgatggca

SEQ ID NO: 8092 - RNA, 41 nt, synthetic construct
  source 1..41: mol_type = other RNA
cggaggggccatgcacagtccttcgggtggcagtgatggca

SEQ ID NO: 8093 - RNA, 41 nt, synthetic construct
  source 1..41: mol_type = other RNA
cggaggggccattcatagtgccctgcgcggcagtgatggca

SEQ ID NO: 8094 - RNA, 43 nt, synthetic construct
  source 1..43: mol_type = other RNA
acggtctcctgggtcaagcagtgatggcatggactgtggtcat

SEQ ID NO: 8095 - RNA, 47 nt, synthetic construct
  source 1..47: mol_type = other RNA
actatcttcttgccaagaggttcagtgatggcatggactgtggtcat

SEQ ID NO: 8096 - RNA, 47 nt, synthetic construct
  source 1..47: mol_type = other RNA
actatcctctagccaagaggttcagtgatggcatggactgtggtcat

SEQ ID NO: 8097 - RNA, 47 nt, synthetic construct
  source 1..47: mol_type = other RNA
cggaggggccatatactatcctctagccaagaggttcagtgatggca

SEQ ID NO: 8098 - RNA, 41 nt, synthetic construct
  source 1..41: mol_type = other RNA
ccagtcttctcggtagcagtgatggcatggactgtggtcat

SEQ ID NO: 8099 - RNA, 45 nt, synthetic construct
  source 1..45: mol_type = other RNA
cggaggggccgtcatgccacagtcccgtgggtggaagtgatggca

SEQ ID NO: 8100 - RNA, 39 nt, synthetic construct
  source 1..39: mol_type = other RNA
acgccacagtttcccggaggggacatacacagtcctggg

SEQ ID NO: 8101 - RNA, 41 nt, synthetic construct
  source 1..41: mol_type = other RNA
acagtccctcgggtggcagtgatggcatggactgtggtcat

SEQ ID NO: 8102 - RNA, 41 nt, synthetic construct
  source 1..41: mol_type = other RNA
cggaggggccgtccacggttccatgggtgccagtgatggca

SEQ ID NO: 8103 - RNA, 40 nt, synthetic construct
  source 1..40: mol_type = other RNA
cggaggggccatctcacagtccctgttggcagtgatggca

SEQ ID NO: 8104 - RNA, 39 nt, synthetic construct
  source 1..39: mol_type = other RNA
acgccacagtttcccggaggggcatctcacagtccctgt

SEQ ID NO: 8105 - RNA, 41 nt, synthetic construct
  source 1..41: mol_type = other RNA
cggaggggccatctcacagtccttggttggcagtgatggca

SEQ ID NO: 8106 - RNA, 40 nt, synthetic construct
  source 1..40: mol_type = other RNA
acgccacagtttcccggaggggcatctcacagtccctggt

SEQ ID NO: 8107 - RNA, 41 nt, synthetic construct
  source 1..41: mol_type = other RNA
acgccacagtttcccggagggacaatcataccgtctctggg

SEQ ID NO: 8108 - RNA, 40 nt, synthetic construct
  source 1..40: mol_type = other RNA
acgccacagtttcccggagggccatcgactgtcccctagg

SEQ ID NO: 8109 - RNA, 41 nt, synthetic construct
  source 1..41: mol_type = other RNA
cggaggggccatcggctgtctcctaggtggcagtgatggca

SEQ ID NO: 8110 - RNA, 49 nt, synthetic construct
  source 1..49: mol_type = other RNA
cggaggggccatcaagcagttctcatgggtcagcctggcagtgatggca

SEQ ID NO: 8111 - RNA, 41 nt, synthetic construct
  source 1..41: mol_type = other RNA
acgccacagtttcccggaggggacatcacacatcccctagg

SEQ ID NO: 8112 - RNA, 41 nt, synthetic construct
  source 1..41: mol_type = other RNA
tcagtcctcttgggggcagtgatggcatggactgtggtcat

SEQ ID NO: 8113 - RNA, 45 nt, synthetic construct
  source 1..45: mol_type = other RNA
cggaggggccatccacatttggttctctgggaggcagtgatggca

SEQ ID NO: 8114 - RNA, 40 nt, synthetic construct
  source 1..40: mol_type = other RNA
acagtccttggttggcagtgatggcatggactgtggtcat

SEQ ID NO: 8115 - RNA, 44 nt, synthetic construct
  source 1..44: mol_type = other RNA
acgccacagtttcccggagggccatccacgtgaagttctctgga

SEQ ID NO: 8116 - RNA, 37 nt, synthetic construct
  source 1..37: mol_type = other RNA
acgccacagtttcccggaggggagtcacagtcctggt

SEQ ID NO: 8117 - RNA, 41 nt, synthetic construct
  source 1..41: mol_type = other RNA
acgccacagtttcccggaggggccatccatagtgccctgcg

SEQ ID NO: 8118 - RNA, 41 nt, synthetic construct
  source 1..41: mol_type = other RNA
cggaggggccatcgcacatctcctaggtggcagtgatggca

SEQ ID NO: 8119 - RNA, 41 nt, synthetic construct
  source 1..41: mol_type = other RNA
gcagtcctcgaggtagtagtgatggcatggactgtggtcat

SEQ ID NO: 8120 - RNA, 42 nt, synthetic construct
  source 1..42: mol_type = other RNA
acgccacagtttcccggaggggcatcaagcagttcccatggg

SEQ ID NO: 8121 - RNA, 40 nt, synthetic construct
  source 1..40: mol_type = other RNA
acgccacagtttcccggagggtacatccacagtccctggg

SEQ ID NO: 8122 - RNA, 39 nt, synthetic construct
  source 1..39: mol_type = other RNA
acgccacagtttcccggagggaacatccacagtcctggg

SEQ ID NO: 8123 - RNA, 41 nt, synthetic construct
  source 1..41: mol_type = other RNA
acgccacagtttcccggaggggccatccacagtcttatggg

SEQ ID NO: 8124 - RNA, 41 nt, synthetic construct
  source 1..41: mol_type = other RNA
acgccacagtttcccggaggggacatccaccatcccctagg

SEQ ID NO: 8125 - RNA, 41 nt, synthetic construct
  source 1..41: mol_type = other RNA
acgccacagtttcccggaggggaaatccacagttccatggg

SEQ ID NO: 8126 - RNA, 41 nt, synthetic construct
  source 1..41: mol_type = other RNA
acagtcttctgcagggcagtgatggcatggactgtggtcat

SEQ ID NO: 8127 - RNA, 41 nt, synthetic construct
  source 1..41: mol_type = other RNA
acgccacagtttcccggaggagccatccatagtcccgtgcg

SEQ ID NO: 8128 - RNA, 41 nt, synthetic construct
  source 1..41: mol_type = other RNA
acgccacagtttcccggaggagccatccatagtctcgtgcg

SEQ ID NO: 8129 - RNA, 40 nt, synthetic construct
  source 1..40: mol_type = other RNA
cagccctttgtggtacagtgatggcatggactgtggtcat

SEQ ID NO: 8130 - RNA, 43 nt, synthetic construct
  source 1..43: mol_type = other RNA
acgccacagtttcccggagggtacatccacatccgtgtctcgg

SEQ ID NO: 8131 - RNA, 43 nt, synthetic construct
  source 1..43: mol_type = other RNA
cggaggggccattcacatccgtgtctcggtggcagtgatggca

SEQ ID NO: 8132 - RNA, 41 nt, synthetic construct
  source 1..41: mol_type = other RNA
gcagtcttctgggtagcagtaatggcatggactgtggtcat

SEQ ID NO: 8133 - RNA, 41 nt, synthetic construct
  source 1..41: mol_type = other RNA
acagttttctgggtggcagtgatggcatggactgtggtcat

SEQ ID NO: 8134 - RNA, 46 nt, synthetic construct
  source 1..46: mol_type = other RNA
acgccacagtttcccggaggggccatccacatccgtcccatctcgg

SEQ ID NO: 8135 - RNA, 41 nt, synthetic construct
  source 1..41: mol_type = other RNA
acgccacagtttcccggaggggacatcacacatctcctagg

SEQ ID NO: 8136 - RNA, 41 nt, synthetic construct
  source 1..41: mol_type = other RNA
acggtccccagggtggcagtgatggcatggactgtggtcat

SEQ ID NO: 8137 - RNA, 40 nt, synthetic construct
  source 1..40: mol_type = other RNA
acaggtctctaggtggtatgatggcatggactgtggtcat

SEQ ID NO: 8138 - RNA, 41 nt, synthetic construct
  source 1..41: mol_type = other RNA
acgccacagtttcccggaggggacatctacaggtctctagg

SEQ ID NO: 8139 - RNA, 41 nt, synthetic construct
  source 1..41: mol_type = other RNA
acgccacagtttcccggaggagccatcgcacatcccctagg

SEQ ID NO: 8140 - RNA, 39 nt, synthetic construct
  source 1..39: mol_type = other RNA
acgccacagtttcccggaggggcatctcacagtcactgt

SEQ ID NO: 8141 - RNA, 41 nt, synthetic construct
  source 1..41: mol_type = other RNA
acagacttctgggtagcagtgatggcatggactgtggtcat

SEQ ID NO: 8142 - RNA, 41 nt, synthetic construct
  source 1..41: mol_type = other RNA
atagttgtctgggtggcggtgatggcatggactgtggtcat

SEQ ID NO: 8143 - RNA, 41 nt, synthetic construct
  source 1..41: mol_type = other RNA
acggctccctgggtggcagtgatggcatggactgtggtcat

SEQ ID NO: 8144 - RNA, 41 nt, synthetic construct
  source 1..41: mol_type = other RNA
agagtccttctggtggcagtgatggcatggactgtggtcat

SEQ ID NO: 8145 - RNA, 40 nt, synthetic construct
  source 1..40: mol_type = other RNA
acgccacagtttcccggagggccatcgactgtctcctagg

SEQ ID NO: 8146 - RNA, 41 nt, synthetic construct
  source 1..41: mol_type = other RNA
atagtcccatcggtggtggtgatggcatggactgtggtcat

SEQ ID NO: 8147 - RNA, 41 nt, synthetic construct
  source 1..41: mol_type = other RNA
acagtcctttgggtagcagtgatggcatggactgtggtcat

SEQ ID NO: 8148 - RNA, 39 nt, synthetic construct
  source 1..39: mol_type = other RNA
acgccacagtttcccggaggggcatctcacagtcctggt

SEQ ID NO: 8149 - RNA, 46 nt, synthetic construct
  source 1..46: mol_type = other RNA
acgccacagtttcccggaggggccatccacatccgtctcatctcgg

SEQ ID NO: 8150 - RNA, 41 nt, synthetic construct
  source 1..41: mol_type = other RNA
acagtcttctgggtggcagtgatggcatggactgtggtcat

SEQ ID NO: 8151 - RNA, 41 nt, synthetic construct
  source 1..41: mol_type = other RNA
acactcgtctgggtggcagtaatggcatggactgtggtcat

SEQ ID NO: 8152 - RNA, 41 nt, synthetic construct
  source 1..41: mol_type = other RNA
acagttctctgggtggcagtgatggcatggactgtggtcat

SEQ ID NO: 8153 - RNA, 41 nt, synthetic construct
  source 1..41: mol_type = other RNA
acgccacagtttcccggaggggccatccatagtgtcctgcg

SEQ ID NO: 8154 - RNA, 40 nt, synthetic construct
  source 1..40: mol_type = other RNA
acatctcctaggtggcggtgatggcatggactgtggtcat

SEQ ID NO: 8155 - RNA, 58 nt, synthetic construct
  source 1..58: mol_type = other RNA
agatactaaggcaggagaaagtcctctgggtggcagtgatggcatggactgtggtcat

SEQ ID NO: 8156 - RNA, 41 nt, synthetic construct
  source 1..41: mol_type = other RNA
acgccacagtttcccggaggggccatccacagtcctatggg

SEQ ID NO: 8157 - RNA, 40 nt, synthetic construct
  source 1..40: mol_type = other RNA
gactgtggtcatgagtccttccacgtcccaaagatgtcat

SEQ ID NO: 8158 - RNA, 40 nt, synthetic construct
  source 1..40: mol_type = other RNA
gactgtggtcatgagtccttcccgattccaaagctgtcat

SEQ ID NO: 8159 - RNA, 41 nt, synthetic construct
  source 1..41: mol_type = other RNA
gactgtggtcatgagtccttcgacgataacagagctgtcat

SEQ ID NO: 8160 - RNA, 41 nt, synthetic construct
  source 1..41: mol_type = other RNA
gactgtggtcatgagtccttccagaataccagagctgtcat

SEQ ID NO: 8161 - RNA, 41 nt, synthetic construct
  source 1..41: mol_type = other RNA
gtccttccacgataacttagctatcatggctgaccttggcc

SEQ ID NO: 8162 - RNA, 41 nt, synthetic construct
  source 1..41: mol_type = other RNA
gactgtggtcatgagtccttccacgataacttagctatcat

SEQ ID NO: 8163 - RNA, 41 nt, synthetic construct
  source 1..41: mol_type = other RNA
gactgtggtcatgagtccttccacgataccaaagctgccat

SEQ ID NO: 8164 - RNA, 41 nt, synthetic construct
  source 1..41: mol_type = other RNA
gactgtggtcatgagtccttccatgataccagagctgtcat

SEQ ID NO: 8165 - RNA, 41 nt, synthetic construct
  source 1..41: mol_type = other RNA
gactgtggtcatgagtccttccacgatgaaaaagctgtcat

SEQ ID NO: 8166 - RNA, 41 nt, synthetic construct
  source 1..41: mol_type = other RNA
gactgtggtcatgagtccttccaagataccagagctgtcat

SEQ ID NO: 8167 - RNA, 41 nt, synthetic construct
  source 1..41: mol_type = other RNA
gactgtggtcatgagtccttacaagataccatagctgtcat

SEQ ID NO: 8168 - RNA, 41 nt, synthetic construct
  source 1..41: mol_type = other RNA
gactgtggtcatgagtccttccaggataccacagctgtcat

SEQ ID NO: 8169 - RNA, 41 nt, synthetic construct
  source 1..41: mol_type = other RNA
gactgtggtcatgagtccttacacgataccagagctatcat

SEQ ID NO: 8170 - RNA, 41 nt, synthetic construct
  source 1..41: mol_type = other RNA
gactgtggtcatgagtccttaaaacatatcaaagctgtcat

SEQ ID NO: 8171 - RNA, 40 nt, synthetic construct
  source 1..40: mol_type = other RNA
gactgtggtcatgagtccttgccgataccaaagctgtcat

SEQ ID NO: 8172 - RNA, 41 nt, synthetic construct
  source 1..41: mol_type = other RNA
gactgtggtcatgagtccttccaggatacaaaagctgtcat

SEQ ID NO: 8173 - RNA, 40 nt, synthetic construct
  source 1..40: mol_type = other RNA
gactgtggtcatgagtccttcccgatacaaacgctgtcat

SEQ ID NO: 8174 - RNA, 41 nt, synthetic construct
  source 1..41: mol_type = other RNA
gactgtggtcatgagtccttcaaagataccaacgctgtcat

SEQ ID NO: 8175 - RNA, 41 nt, synthetic construct
  source 1..41: mol_type = other RNA
gtccttccacactacgagagctgtcatgggtgaccttggcc

SEQ ID NO: 8176 - RNA, 40 nt, synthetic construct
  source 1..40: mol_type = other RNA
gactgtggtcatgagtccttccacgtcccaaagctgtcat

SEQ ID NO: 8177 - RNA, 41 nt, synthetic construct
  source 1..41: mol_type = other RNA
gactgtggtcatgagtccttccaatataccaaagctgtcat

SEQ ID NO: 8178 - RNA, 41 nt, synthetic construct
  source 1..41: mol_type = other RNA
gactgtggtcatgagtccttccacgataacttagttatcat

SEQ ID NO: 8179 - RNA, 41 nt, synthetic construct
  source 1..41: mol_type = other RNA
gactgtggtcatgagtccttccaggatacccaagctgtcat

SEQ ID NO: 8180 - RNA, 41 nt, synthetic construct
  source 1..41: mol_type = other RNA
gactgtggtcatgagtccttccacgataccagagctgtcat

SEQ ID NO: 8181 - RNA, 41 nt, synthetic construct
  source 1..41: mol_type = other RNA
gactgtggtcatgagtccttccacgctacgaacgctgtcat

SEQ ID NO: 8182 - RNA, 41 nt, synthetic construct
  source 1..41: mol_type = other RNA
gactgtggtcatgagtccttccacgctcgcaaagctgtcat

SEQ ID NO: 8183 - RNA, 41 nt, synthetic construct
  source 1..41: mol_type = other RNA
gactgtggtcatgagtccttccccgatacaaaagctgtcat

SEQ ID NO: 8184 - RNA, 41 nt, synthetic construct
  source 1..41: mol_type = other RNA
gactgtggtcatgagtccttctgtgataacaaagctgtcat

SEQ ID NO: 8185 - RNA, 41 nt, synthetic construct
  source 1..41: mol_type = other RNA
gactgtggtcatgagtccttccatactaccaatgctgtcat

SEQ ID NO: 8186 - RNA, 41 nt, synthetic construct
  source 1..41: mol_type = other RNA
gactgtggtcatgagtccttccatgacacgtaagctgtcat

SEQ ID NO: 8187 - RNA, 41 nt, synthetic construct
  source 1..41: mol_type = other RNA
gactgtggtcatgagtccttccacgatacataagctgtcag

SEQ ID NO: 8188 - RNA, 41 nt, synthetic construct
  source 1..41: mol_type = other RNA
gtccttccacgataccagggctatcatggctgaccttggcc

SEQ ID NO: 8189 - RNA, 41 nt, synthetic construct
  source 1..41: mol_type = other RNA
gactgtggtcatgagtccttacacgataccaaagctatcat

SEQ ID NO: 8190 - RNA, 41 nt, synthetic construct
  source 1..41: mol_type = other RNA
gactgtggtcatgagtccttccacgataccaatgctgtcat

SEQ ID NO: 8191 - RNA, 41 nt, synthetic construct
  source 1..41: mol_type = other RNA
gactgtggtcatgagtccttacacgataccagagttatcat

SEQ ID NO: 8192 - RNA, 41 nt, synthetic construct
  source 1..41: mol_type = other RNA
gactgtggtcatgagtccttctacgatacaaaagctgtcat

SEQ ID NO: 8193 - RNA, 41 nt, synthetic construct
  source 1..41: mol_type = other RNA
gactgtggtcatgagtccttccaaaatactaaagctgtcat

SEQ ID NO: 8194 - RNA, 41 nt, synthetic construct
  source 1..41: mol_type = other RNA
gactgtggtcatgagtccttccacgatacccaagctatcat

SEQ ID NO: 8195 - RNA, 41 nt, synthetic construct
  source 1..41: mol_type = other RNA
gactgtggtcatgagtccttccacgataataaagctatcat

SEQ ID NO: 8196 - RNA, 41 nt, synthetic construct
  source 1..41: mol_type = other RNA
gactgtggtcatgagtccttccagactaccagagctgtcat

SEQ ID NO: 8197 - RNA, 41 nt, synthetic construct
  source 1..41: mol_type = other RNA
gactgtggtcatgagtccttcaacgattacaaagctgtcat

SEQ ID NO: 8198 - RNA, 41 nt, synthetic construct
  source 1..41: mol_type = other RNA
gtccttccacggtaacaacgctgtcatgggtgaccttggcc

SEQ ID NO: 8199 - RNA, 41 nt, synthetic construct
  source 1..41: mol_type = other RNA
gactgtggtcatgagtccttccaaactatcagagctgtcat

SEQ ID NO: 8200 - RNA, 41 nt, synthetic construct
  source 1..41: mol_type = other RNA
gtccttccacgatgataaagctatcatggctgaccttggcc

SEQ ID NO: 8201 - RNA, 41 nt, synthetic construct
  source 1..41: mol_type = other RNA
gactgtggtcatgagtccttccacgataattaagctgtcat

SEQ ID NO: 8202 - RNA, 41 nt, synthetic construct
  source 1..41: mol_type = other RNA
gactgtggtcatgagtccttccattctaccaatgctgtcat

SEQ ID NO: 8203 - RNA, 41 nt, synthetic construct
  source 1..41: mol_type = other RNA
gactgtggtcatgagtccttacacgttaccaaagctgtcat

SEQ ID NO: 8204 - RNA, 41 nt, synthetic construct
  source 1..41: mol_type = other RNA
gtccttccacgatactaacgctgtcatgaatgaccttggcc

SEQ ID NO: 8205 - RNA, 41 nt, synthetic construct
  source 1..41: mol_type = other RNA
gactgtggtcatgagtccttccaggatatcagagctgtcgt

SEQ ID NO: 8206 - RNA, 41 nt, synthetic construct
  source 1..41: mol_type = other RNA
gactgtggtcatgagtccttccacggtaccgaagctgtcat

SEQ ID NO: 8207 - RNA, 41 nt, synthetic construct
  source 1..41: mol_type = other RNA
gactgtggtcatgagtccttccatcatacaagagctgtcat

SEQ ID NO: 8208 - RNA, 41 nt, synthetic construct
  source 1..41: mol_type = other RNA
gactgtggtcatgagtccttccacgatactaaagctgtcat

SEQ ID NO: 8209 - RNA, 41 nt, synthetic construct
  source 1..41: mol_type = other RNA
gactgtggtcatgagtccttccacgataataaagttatcat

SEQ ID NO: 8210 - RNA, 41 nt, synthetic construct
  source 1..41: mol_type = other RNA
gactgtggtcatgagtccttacacgatactaaagctgtcat

SEQ ID NO: 8211 - RNA, 41 nt, synthetic construct
  source 1..41: mol_type = other RNA
gactgtggtcatgagtccttccccgattaaaaagctgtcat

SEQ ID NO: 8212 - RNA, 41 nt, synthetic construct
  source 1..41: mol_type = other RNA
gactgtggtcatgagtccttccaagataccagagctgtcaa

SEQ ID NO: 8213 - RNA, 41 nt, synthetic construct
  source 1..41: mol_type = other RNA
gtccttccacgatcacagagctatcattgctgaccttggcc

SEQ ID NO: 8214 - RNA, 41 nt, synthetic construct
  source 1..41: mol_type = other RNA
gactgtggtcatgagtccttccaggatacaaaagttgtcat

SEQ ID NO: 8215 - RNA, 40 nt, synthetic construct
  source 1..40: mol_type = other RNA
gactgtggtcatgagtcctttcacgtcccaaagccgtcat

SEQ ID NO: 8216 - RNA, 41 nt, synthetic construct
  source 1..41: mol_type = other RNA
gactgtggtcatgagtccttccacgatcacagagctatcat

SEQ ID NO: 8217 - RNA, 41 nt, synthetic construct
  source 1..41: mol_type = other RNA
gactgtggtcatgagtccttccacactacgaaagctgtcat

SEQ ID NO: 8218 - RNA, 41 nt, synthetic construct
  source 1..41: mol_type = other RNA
gtccttccacgctacgaacgctgtcatggatgaccttggcc

SEQ ID NO: 8219 - RNA, 41 nt, synthetic construct
  source 1..41: mol_type = other RNA
gtccttccaccatacaagagctgtcctggatgaccttggcc

SEQ ID NO: 8220 - RNA, 41 nt, synthetic construct
  source 1..41: mol_type = other RNA
gactgtggtcatgagtccttccccgatccaaaagctgtcat

SEQ ID NO: 8221 - RNA, 40 nt, synthetic construct
  source 1..40: mol_type = other RNA
gactgtggtcatgagtccttcaacgtaccaaagctgtcac

SEQ ID NO: 8222 - RNA, 41 nt, synthetic construct
  source 1..41: mol_type = other RNA
gactgtggtcatgagtccttccacgagcccacagctgtcat

SEQ ID NO: 8223 - RNA, 41 nt, synthetic construct
  source 1..41: mol_type = other RNA
gtccttccacgatacccaagctatcatggatgaccttggcc

SEQ ID NO: 8224 - RNA, 41 nt, synthetic construct
  source 1..41: mol_type = other RNA
gtccttccacgatactaatgctgcaatggacgaccttggcc

SEQ ID NO: 8225 - RNA, 41 nt, synthetic construct
  source 1..41: mol_type = other RNA
gactgtggtcatgagtccttccacggtaccgaagttgtcat

SEQ ID NO: 8226 - RNA, 41 nt, synthetic construct
  source 1..41: mol_type = other RNA
gactgtggtcatgagtccttccacgatcacagagttatcat

SEQ ID NO: 8227 - RNA, 41 nt, synthetic construct
  source 1..41: mol_type = other RNA
gactgtggtcatgagtccttccacggtaccaaagctgtcat

SEQ ID NO: 8228 - RNA, 41 nt, synthetic construct
  source 1..41: mol_type = other RNA
gtccttccacgatactaacgctgtcatgggggaccttggcc

SEQ ID NO: 8229 - RNA, 40 nt, synthetic construct
  source 1..40: mol_type = other RNA
gactgtggtcatgagtccttcccgatacaaacgttgtcat

SEQ ID NO: 8230 - RNA, 41 nt, synthetic construct
  source 1..41: mol_type = other RNA
gactgtggtcatgagtccttccacgctactaaagctgtcat

SEQ ID NO: 8231 - RNA, 41 nt, synthetic construct
  source 1..41: mol_type = other RNA
gactgtggtcatgagtccttccacgataacaacgctgtcat

SEQ ID NO: 8232 - RNA, 41 nt, synthetic construct
  source 1..41: mol_type = other RNA
gactgtggtcatgagtccttccacgataattaagttgtcat

SEQ ID NO: 8233 - RNA, 41 nt, synthetic construct
  source 1..41: mol_type = other RNA
gactgtggtcatgagtccttccatgataccagagttgtcat

SEQ ID NO: 8234 - RNA, 41 nt, synthetic construct
  source 1..41: mol_type = other RNA
gtccttccacgataacttagttatcatggctgaccttggcc

SEQ ID NO: 8235 - RNA, 42 nt, synthetic construct
  source 1..42: mol_type = other RNA
gtccttccacgatacaaaaagctgccatggctgaccttggcc

SEQ ID NO: 8236 - RNA, 41 nt, synthetic construct
  source 1..41: mol_type = other RNA
gactgtggtcatgagtccttctaagatatcaaagctgtcag

SEQ ID NO: 8237 - RNA, 41 nt, synthetic construct
  source 1..41: mol_type = other RNA
gactgtggtcatgagtccttctacgttaccaaaattgacat

SEQ ID NO: 8238 - RNA, 41 nt, synthetic construct
  source 1..41: mol_type = other RNA
gactgtggtcatgagtccttccacgatacccaagctgtcat

SEQ ID NO: 8239 - RNA, 40 nt, synthetic construct
  source 1..40: mol_type = other RNA
gactgtggtcatgagtccttcccgattccaaagttgtcat

SEQ ID NO: 8240 - RNA, 41 nt, synthetic construct
  source 1..41: mol_type = other RNA
gactgtggtcatgagtccttctacgataccaaggctgtcgt

SEQ ID NO: 8241 - RNA, 41 nt, synthetic construct
  source 1..41: mol_type = other RNA
gactgtggtcatgagtccttccagaataccagagctgtaat

SEQ ID NO: 8242 - RNA, 41 nt, synthetic construct
  source 1..41: mol_type = other RNA
gactgtggtcatgagtccttccacaataccccagctgtcat

SEQ ID NO: 8243 - RNA, 41 nt, synthetic construct
  source 1..41: mol_type = other RNA
gactgtggtcatgagtccttacacgataccaaagctgtcat

SEQ ID NO: 8244 - RNA, 41 nt, synthetic construct
  source 1..41: mol_type = other RNA
gtccttccacggtaattgagctgtcatgggtgaccttggcc

SEQ ID NO: 8245 - RNA, 41 nt, synthetic construct
  source 1..41: mol_type = other RNA
gtccttccacgatcacagagctatcatggctgaccttggcc

SEQ ID NO: 8246 - RNA, 39 nt, synthetic construct
  source 1..39: mol_type = other RNA
gactgtggtcatgagtccttcagataccaaaactgccat

SEQ ID NO: 8247 - RNA, 41 nt, synthetic construct
  source 1..41: mol_type = other RNA
gtccttccacgatacccaagctgtaatgaatgaccttggcc

SEQ ID NO: 8248 - RNA, 41 nt, synthetic construct
  source 1..41: mol_type = other RNA
gtccttccacgctactaatgctgtcaggaatgaccttggcc

SEQ ID NO: 8249 - RNA, 41 nt, synthetic construct
  source 1..41: mol_type = other RNA
gactgtggtcatgagtccttctacgatgcgaaagctgtcat

SEQ ID NO: 8250 - RNA, 40 nt, synthetic construct
  source 1..40: mol_type = other RNA
gactgtggtcatgagtccttcacgataacacagctgttat

SEQ ID NO: 8251 - RNA, 41 nt, synthetic construct
  source 1..41: mol_type = other RNA
gtccttccacgataccgaagctgtaatagacgaccttggcc

SEQ ID NO: 8252 - RNA, 41 nt, synthetic construct
  source 1..41: mol_type = other RNA
gactgtggtcatgagtccttgcacgataccaaagctgttat

SEQ ID NO: 8253 - RNA, 41 nt, synthetic construct
  source 1..41: mol_type = other RNA
gtccttccacgatactaaagctgtcctggatgaccttggcc

SEQ ID NO: 8254 - RNA, 41 nt, synthetic construct
  source 1..41: mol_type = other RNA
gactgtggtcatgagtccttccccgatacaaaagttgtcat

SEQ ID NO: 8255 - RNA, 41 nt, synthetic construct
  source 1..41: mol_type = other RNA
gtccttccaccatacaagagctgttatggatgaccttggcc

SEQ ID NO: 8256 - RNA, 41 nt, synthetic construct
  source 1..41: mol_type = other RNA
gactgtggtcatgagtccttccacgattccaaagctgtcat

SEQ ID NO: 8257 - RNA, 41 nt, synthetic construct
  source 1..41: mol_type = other RNA
gactgtggtcatgagtccttccacgctaccccagctgtcat

SEQ ID NO: 8258 - RNA, 42 nt, synthetic construct
  source 1..42: mol_type = other RNA
gactgtggtcatgagtccttctcacgatgcgaaagctgtcat

SEQ ID NO: 8259 - RNA, 41 nt, synthetic construct
  source 1..41: mol_type = other RNA
gtccttccacaataccggagctgtaatggatgaccttggcc

SEQ ID NO: 8260 - RNA, 41 nt, synthetic construct
  source 1..41: mol_type = other RNA
gtccttccacgataacacagctgttgtggatgaccttggcc

SEQ ID NO: 8261 - RNA, 41 nt, synthetic construct
  source 1..41: mol_type = other RNA
gactgtggtcatgagtccttatgcaatatcaaagctgtcat

SEQ ID NO: 8262 - RNA, 41 nt, synthetic construct
  source 1..41: mol_type = other RNA
gtccttccacgatacaaaagctgtcatgggtgaccttggcc

SEQ ID NO: 8263 - RNA, 41 nt, synthetic construct
  source 1..41: mol_type = other RNA
gactgtggtcatgagtcctttcacgataccaaggctgtaat

SEQ ID NO: 8264 - RNA, 41 nt, synthetic construct
  source 1..41: mol_type = other RNA
gtccttccacgatacccaagctgttatggctgaccttggcc

SEQ ID NO: 8265 - RNA, 42 nt, synthetic construct
  source 1..42: mol_type = other RNA
gactgtggtcatgagtccttctccgatgaaaaagctgtcgat

SEQ ID NO: 8266 - RNA, 41 nt, synthetic construct
  source 1..41: mol_type = other RNA
gactgtggtcatgagtccttacaagataccatagatgtcat

SEQ ID NO: 8267 - RNA, 41 nt, synthetic construct
  source 1..41: mol_type = other RNA
gactgtggtcatgagtccttccacgatactaaagttgtcat

SEQ ID NO: 8268 - RNA, 41 nt, synthetic construct
  source 1..41: mol_type = other RNA
gactgtggtcatgagtccttctacgataccaaagctgtcat

SEQ ID NO: 8269 - RNA, 41 nt, synthetic construct
  source 1..41: mol_type = other RNA
gactgtggtcatgagtccttccgcgatatcaacgctgtcat

SEQ ID NO: 8270 - RNA, 41 nt, synthetic construct
  source 1..41: mol_type = other RNA
gactgtggtcatgagtccttccacgataccaacgctgtcat

SEQ ID NO: 8271 - RNA, 41 nt, synthetic construct
  source 1..41: mol_type = other RNA
gactgtggtcatgagtcctttgacgacataacagctgtcat

SEQ ID NO: 8272 - RNA, 41 nt, synthetic construct
  source 1..41: mol_type = other RNA
gtccttccacgatataaaagctgtgatggatgaccttggcc

SEQ ID NO: 8273 - RNA, 41 nt, synthetic construct
  source 1..41: mol_type = other RNA
gactgtggtcatgagtccttccacgataccaaagctgtcat

SEQ ID NO: 8274 - RNA, 41 nt, synthetic construct
  source 1..41: mol_type = other RNA
gtccttccacgatgcgaaagctgtcacggatgaccttggcc

SEQ ID NO: 8275 - RNA, 41 nt, synthetic construct
  source 1..41: mol_type = other RNA
gactgtggtcatgagtccttccacaataccaaagctgtcat

SEQ ID NO: 8276 - RNA, 41 nt, synthetic construct
  source 1..41: mol_type = other RNA
gtccttccacaataccagagctgtcatggatgaccttggcc

SEQ ID NO: 8277 - RNA, 41 nt, synthetic construct
  source 1..41: mol_type = other RNA
gactgtggtcatgagtccttccaggctaccaaagctgtcac

SEQ ID NO: 8278 - RNA, 41 nt, synthetic construct
  source 1..41: mol_type = other RNA
gactgtggtcatgagtccttccacgctaccacagctgtcat

SEQ ID NO: 8279 - RNA, 41 nt, synthetic construct
  source 1..41: mol_type = other RNA
gactgtggtcatgagtccttccacgctcgcaaagttgtcat

SEQ ID NO: 8280 - RNA, 41 nt, synthetic construct
  source 1..41: mol_type = other RNA
gactgtggtcatgagtccttatgctatatcaaagctgtcat

SEQ ID NO: 8281 - RNA, 41 nt, synthetic construct
  source 1..41: mol_type = other RNA
gactgtggtcatgagtccttccaagatactaaagctgtcct

SEQ ID NO: 8282 - RNA, 41 nt, synthetic construct
  source 1..41: mol_type = other RNA
gactgtggtcatgagtccttccacgctactaaagttgtcat

SEQ ID NO: 8283 - RNA, 40 nt, synthetic construct
  source 1..40: mol_type = other RNA
gactgtggtcatgagtccttaaccgatacaaaagcttcat

SEQ ID NO: 8284 - RNA, 41 nt, synthetic construct
  source 1..41: mol_type = other RNA
gtccttccacgttaccaaagctgtcatggctgaccttggcc

SEQ ID NO: 8285 - RNA, 43 nt, synthetic construct
  source 1..43: mol_type = other RNA
gtccttccacgctactaaagctgtcagaatcatgaccttggcc

SEQ ID NO: 8286 - RNA, 42 nt, synthetic construct
  source 1..42: mol_type = other RNA
gactgtggtcatgagtccttccccgacgaccaagctgtcgat

SEQ ID NO: 8287 - RNA, 41 nt, synthetic construct
  source 1..41: mol_type = other RNA
gtccttccacaataccggagctgtaatggacgaccttggcc

SEQ ID NO: 8288 - RNA, 40 nt, synthetic construct
  source 1..40: mol_type = other RNA
gactgtggtcatgagtcctttcacgtcccaaagtcgtcat

SEQ ID NO: 8289 - RNA, 42 nt, synthetic construct
  source 1..42: mol_type = other RNA
gactgtggtcatgagtccttccacgatacaaaaagctgccat

SEQ ID NO: 8290 - RNA, 43 nt, synthetic construct
  source 1..43: mol_type = other RNA
gactgtggtcatgagtccttccccgattagcaaaagctgtcat

SEQ ID NO: 8291 - RNA, 41 nt, synthetic construct
  source 1..41: mol_type = other RNA
gactgtggtcatgagtccttccatcatacaagagctgtcct

SEQ ID NO: 8292 - RNA, 41 nt, synthetic construct
  source 1..41: mol_type = other RNA
gtccttccacactaccaatgctgtcatggaagaccttggcc

SEQ ID NO: 8293 - RNA, 41 nt, synthetic construct
  source 1..41: mol_type = other RNA
gtccttccacgataacagagctgtcatggatgaccttggcc

SEQ ID NO: 8294 - RNA, 41 nt, synthetic construct
  source 1..41: mol_type = other RNA
gactgtggtcatgagtccttccccgatatgaaagctttcat

SEQ ID NO: 8295 - RNA, 41 nt, synthetic construct
  source 1..41: mol_type = other RNA
gtccttccacgatattaaagctgtcagggatgaccttggcc

SEQ ID NO: 8296 - RNA, 41 nt, synthetic construct
  source 1..41: mol_type = other RNA
gtccttccacgatactaaagctgtcatcgatgaccttggcc

SEQ ID NO: 8297 - RNA, 41 nt, synthetic construct
  source 1..41: mol_type = other RNA
gactgtggtcatgagtccttccacgataccaaagctgttat

SEQ ID NO: 8298 - RNA, 41 nt, synthetic construct
  source 1..41: mol_type = other RNA
gactgtggtcatgagtccttccccgacttgaaagctgtcaa

SEQ ID NO: 8299 - RNA, 41 nt, synthetic construct
  source 1..41: mol_type = other RNA
gtccttccacgataccaaggctgtcgtggatgaccttggcc

SEQ ID NO: 8300 - RNA, 41 nt, synthetic construct
  source 1..41: mol_type = other RNA
gactgtggtcatgagtccttccaaaataccagagctgtaat

SEQ ID NO: 8301 - RNA, 41 nt, synthetic construct
  source 1..41: mol_type = other RNA
gtccttccacgctaccaaagctgtcacgggtgaccttggcc

SEQ ID NO: 8302 - RNA, 41 nt, synthetic construct
  source 1..41: mol_type = other RNA
gactgtggtcatgagtccttccacgatacccaagttgtcat

SEQ ID NO: 8303 - RNA, 41 nt, synthetic construct
  source 1..41: mol_type = other RNA
gactgtggtcatgagtccttccacgataccaaagttgtcat

SEQ ID NO: 8304 - RNA, 41 nt, synthetic construct
  source 1..41: mol_type = other RNA
gactgtggtcatgagtccttccatcatacaagagttgtcat

SEQ ID NO: 8305 - RNA, 41 nt, synthetic construct
  source 1..41: mol_type = other RNA
gtccttccacaatactaaagctgtcatggatgaccttggcc

SEQ ID NO: 8306 - RNA, 41 nt, synthetic construct
  source 1..41: mol_type = other RNA
gtccttccacgctactaaagctgttatcgatgaccttggcc

SEQ ID NO: 8307 - RNA, 40 nt, synthetic construct
  source 1..40: mol_type = other RNA
gactgtggtcatgagtccttacacgatactaaagcttcat

SEQ ID NO: 8308 - RNA, 41 nt, synthetic construct
  source 1..41: mol_type = other RNA
gtccttccacgacacgtgagctgtcatgggtgaccttggcc

SEQ ID NO: 8309 - RNA, 41 nt, synthetic construct
  source 1..41: mol_type = other RNA
ccaaggttgtcgtggatggccttggccaggggtgctaagca

SEQ ID NO: 8310 - RNA, 41 nt, synthetic construct
  source 1..41: mol_type = other RNA
gactgtggtcatgagtccttccaggataccacagttgtcat

SEQ ID NO: 8311 - RNA, 41 nt, synthetic construct
  source 1..41: mol_type = other RNA
gtccttccacgatgcgaaagctgtcatggatgaccttggcc

SEQ ID NO: 8312 - RNA, 41 nt, synthetic construct
  source 1..41: mol_type = other RNA
gtccttccacggtaccaaggctgtaatggatgaccttggcc

SEQ ID NO: 8313 - RNA, 41 nt, synthetic construct
  source 1..41: mol_type = other RNA
gtccttccacgatacaaaagctgtcatatctgaccttggcc

SEQ ID NO: 8314 - RNA, 41 nt, synthetic construct
  source 1..41: mol_type = other RNA
gtccttccacgatacaaacgctgtcatggatgaccttggcc

SEQ ID NO: 8315 - RNA, 41 nt, synthetic construct
  source 1..41: mol_type = other RNA
gactgtggtcatgagtccttacacgatactaaagttgtcat

SEQ ID NO: 8316 - RNA, 41 nt, synthetic construct
  source 1..41: mol_type = other RNA
gtccttccacgatctcaaagctgtcctggatgaccttggcc

SEQ ID NO: 8317 - RNA, 41 nt, synthetic construct
  source 1..41: mol_type = other RNA
gactgtggtcatgagtccttccaatataccaaagttgtcat

SEQ ID NO: 8318 - RNA, 41 nt, synthetic construct
  source 1..41: mol_type = other RNA
gtccttccacgataccaaagctatcatggatgaccttggcc

SEQ ID NO: 8319 - RNA, 41 nt, synthetic construct
  source 1..41: mol_type = other RNA
gactgtggtcatgagtccttcaaagataccaacgttgtcat

SEQ ID NO: 8320 - RNA, 41 nt, synthetic construct
  source 1..41: mol_type = other RNA
gtccttccacgaataccgaagctgtatggttgaccttggcc

SEQ ID NO: 8321 - RNA, 41 nt, synthetic construct
  source 1..41: mol_type = other RNA
gactgtggtcatgagtccttccacaataccccagttgtcat

SEQ ID NO: 8322 - RNA, 41 nt, synthetic construct
  source 1..41: mol_type = other RNA
gactgtggtcatgagtccttctacgataccaaagttgtcat

SEQ ID NO: 8323 - RNA, 40 nt, synthetic construct
  source 1..40: mol_type = other RNA
gactgtggtcatgagtccttcacgataacacagttgttat

SEQ ID NO: 8324 - RNA, 41 nt, synthetic construct
  source 1..41: mol_type = other RNA
gactgtggtcatgagtccttgcacgataccaaagctgtcac

SEQ ID NO: 8325 - RNA, 41 nt, synthetic construct
  source 1..41: mol_type = other RNA
gtccttccacgataccaaagctgtcatggatgaccttggcc

SEQ ID NO: 8326 - RNA, 41 nt, synthetic construct
  source 1..41: mol_type = other RNA
gtccttccacgatactaaagttgtcctggatgaccttggcc

SEQ ID NO: 8327 - RNA, 41 nt, synthetic construct
  source 1..41: mol_type = other RNA
gtccttccacgatacaaaagttgtcatgggtgaccttggcc

SEQ ID NO: 8328 - RNA, 41 nt, synthetic construct
  source 1..41: mol_type = other RNA
gactgtggtcatgagtccttctacgatgcgaaagctgtcac

SEQ ID NO: 8329 - RNA, 41 nt, synthetic construct
  source 1..41: mol_type = other RNA
gtccttccacgataacaaagctgtcatggatgaccttggcc

SEQ ID NO: 8330 - RNA, 41 nt, synthetic construct
  source 1..41: mol_type = other RNA
gtccttccacggtaccgaagttgtcatggatgaccttggcc

SEQ ID NO: 8331 - RNA, 40 nt, synthetic construct
  source 1..40: mol_type = other RNA
gtccttccacggtaccaaagctgtcgtgatgaccttggcc

SEQ ID NO: 8332 - RNA, 40 nt, synthetic construct
  source 1..40: mol_type = other RNA
gactgtggtcatgagtccttccacgctaccaatgctgtca

SEQ ID NO: 8333 - RNA, 41 nt, synthetic construct
  source 1..41: mol_type = other RNA
gtccttccacgatattaacgctgtcatggatgaccttggcc

SEQ ID NO: 8334 - RNA, 41 nt, synthetic construct
  source 1..41: mol_type = other RNA
gactgtggtcatgagtccttccacgatataaaagctgtgat

SEQ ID NO: 8335 - RNA, 41 nt, synthetic construct
  source 1..41: mol_type = other RNA
gtccttccacgatcctaaagctgtcgcggatgaccttggcc

SEQ ID NO: 8336 - RNA, 41 nt, synthetic construct
  source 1..41: mol_type = other RNA
gactgtggtcatgagtccttccacgataccaaagttgccat

SEQ ID NO: 8337 - RNA, 41 nt, synthetic construct
  source 1..41: mol_type = other RNA
gtccttccactataccaaagttgtcatggatgaccttggcc

SEQ ID NO: 8338 - RNA, 41 nt, synthetic construct
  source 1..41: mol_type = other RNA
gtccttccacgataccaaagttgttatggctgaccttggcc

SEQ ID NO: 8339 - RNA, 42 nt, synthetic construct
  source 1..42: mol_type = other RNA
gtccttccacgatgaaaaagctgtcgatggttgaccttggcc

SEQ ID NO: 8340 - RNA, 41 nt, synthetic construct
  source 1..41: mol_type = other RNA
gtccttccacggtaccaaggctgtcgttgatgaccttggcc

SEQ ID NO: 8341 - RNA, 41 nt, synthetic construct
  source 1..41: mol_type = other RNA
gtccttccacgatattaaggctgtcgtggatgaccttggcc

SEQ ID NO: 8342 - RNA, 41 nt, synthetic construct
  source 1..41: mol_type = other RNA
gtccttccacggtaccgaagctgtcatggatgaccttggcc

SEQ ID NO: 8343 - RNA, 41 nt, synthetic construct
  source 1..41: mol_type = other RNA
gtccttccacgattccaaagctgtcctggatgaccttggcc

SEQ ID NO: 8344 - RNA, 41 nt, synthetic construct
  source 1..41: mol_type = other RNA
gactgtggtcatgagtcctttcacgctactaaagctgtcag

SEQ ID NO: 8345 - RNA, 41 nt, synthetic construct
  source 1..41: mol_type = other RNA
gtccttccacgatatcggagctgtcgtggacgaccttggcc

SEQ ID NO: 8346 - RNA, 41 nt, synthetic construct
  source 1..41: mol_type = other RNA
gtccttccacgataccagagctgtcatcgatgaccttggcc

SEQ ID NO: 8347 - RNA, 41 nt, synthetic construct
  source 1..41: mol_type = other RNA
gtccttccacgatacaaaagctgtcatggatgaccttggcc

SEQ ID NO: 8348 - RNA, 41 nt, synthetic construct
  source 1..41: mol_type = other RNA
gactgtggtcatgagtccttccacgctaccacagttgtcat

SEQ ID NO: 8349 - RNA, 41 nt, synthetic construct
  source 1..41: mol_type = other RNA
gtccttccacgatgataaagttatcatggctgaccttggcc

SEQ ID NO: 8350 - RNA, 41 nt, synthetic construct
  source 1..41: mol_type = other RNA
gtccttccacggtaccaaagctgtcacggatgaccttggcc

SEQ ID NO: 8351 - RNA, 41 nt, synthetic construct
  source 1..41: mol_type = other RNA
gtccttccacgataccaaggttgttatggatgaccttggcc

SEQ ID NO: 8352 - RNA, 52 nt, synthetic construct
  source 1..52: mol_type = other RNA
gtccttccacgataccaaagctgccatggcatgcgccaccatgaccttggcc

SEQ ID NO: 8353 - RNA, 41 nt, synthetic construct
  source 1..41: mol_type = other RNA
gtccttccacgataccaaggttgtcgtggatgaccttggcc

SEQ ID NO: 8354 - RNA, 41 nt, synthetic construct
  source 1..41: mol_type = other RNA
gtccttccacggtaccggagctgtcaaggacgaccttggcc

SEQ ID NO: 8355 - RNA, 43 nt, synthetic construct
  source 1..43: mol_type = other RNA
gactgtggtcatgagtccttccccgattagcaaaagttgtcat

SEQ ID NO: 8356 - RNA, 40 nt, synthetic construct
  source 1..40: mol_type = other RNA
caaaagcttcatggatggccttggccaggggtgctaagca

SEQ ID NO: 8357 - RNA, 41 nt, synthetic construct
  source 1..41: mol_type = other RNA
gtccttccacgatattaacgttgtcatggatgaccttggcc

SEQ ID NO: 8358 - RNA, 41 nt, synthetic construct
  source 1..41: mol_type = other RNA
gtccttccacgataccaatgctgtcatggatgaccttggcc

SEQ ID NO: 8359 - RNA, 41 nt, synthetic construct
  source 1..41: mol_type = other RNA
gactgtggtcatgagtccttccacgatgccaaagctgtccg

SEQ ID NO: 8360 - RNA, 42 nt, synthetic construct
  source 1..42: mol_type = other RNA
gtccttccacgatacctaaagctgtaatggctgaccttggcc

SEQ ID NO: 8361 - RNA, 41 nt, synthetic construct
  source 1..41: mol_type = other RNA
gtccttccacgctaccacagctgtcatggatgaccttggcc

SEQ ID NO: 8362 - RNA, 41 nt, synthetic construct
  source 1..41: mol_type = other RNA
gtccttccaccatacaagagttgttatggatgaccttggcc

SEQ ID NO: 8363 - RNA, 45 nt, synthetic construct
  source 1..45: mol_type = other RNA
ccgaagctgttataaaaagatgaccttggccaggggtgctaagca

SEQ ID NO: 8364 - RNA, 42 nt, synthetic construct
  source 1..42: mol_type = other RNA
gtccttccacgaataccagagctgtcattgacgaccttggcc

SEQ ID NO: 8365 - RNA, 41 nt, synthetic construct
  source 1..41: mol_type = other RNA
gtccttccacgataccggagctgtcattgacgaccttggcc

SEQ ID NO: 8366 - RNA, 41 nt, synthetic construct
  source 1..41: mol_type = other RNA
gactgtggtcatgagtccttccacgatctcaaagctgtcct

SEQ ID NO: 8367 - RNA, 41 nt, synthetic construct
  source 1..41: mol_type = other RNA
gtccttccacgatgtcatagctgtcatagctgaccttggcc

SEQ ID NO: 8368 - RNA, 41 nt, synthetic construct
  source 1..41: mol_type = other RNA
ccaaagctggcatggatgactttggccaggggtgctaagca

SEQ ID NO: 8369 - RNA, 41 nt, synthetic construct
  source 1..41: mol_type = other RNA
gtccttccacgctaccccagctgtcatgggtgaccttggcc

SEQ ID NO: 8370 - RNA, 41 nt, synthetic construct
  source 1..41: mol_type = other RNA
gtccttccacgataccaaagttataatggctgaccttggcc

SEQ ID NO: 8371 - RNA, 40 nt, synthetic construct
  source 1..40: mol_type = other RNA
gactgtggtcatgagtccttccagatatcagagctgaaat

SEQ ID NO: 8372 - RNA, 41 nt, synthetic construct
  source 1..41: mol_type = other RNA
gactgtggtcatgagtccttccacgatacccaagctgtaat

SEQ ID NO: 8373 - RNA, 41 nt, synthetic construct
  source 1..41: mol_type = other RNA
gactgtggtcatgagtccttccaggataccaaagctgtaat

SEQ ID NO: 8374 - RNA, 41 nt, synthetic construct
  source 1..41: mol_type = other RNA
gtccttccacgataccaaggctgttatggatgaccttggcc

SEQ ID NO: 8375 - RNA, 41 nt, synthetic construct
  source 1..41: mol_type = other RNA
gtccttccacgatacataagctgtcagagatgaccttggcc

SEQ ID NO: 8376 - RNA, 40 nt, synthetic construct
  source 1..40: mol_type = other RNA
ccaaagctgtcatggatattttggccaggggtgctaagca

SEQ ID NO: 8377 - RNA, 41 nt, synthetic construct
  source 1..41: mol_type = other RNA
gtccttccacgataccaaagctgttatggctgaccttggcc

SEQ ID NO: 8378 - RNA, 41 nt, synthetic construct
  source 1..41: mol_type = other RNA
gtccttccacgatactaaagttgtcatagatgaccttggcc

SEQ ID NO: 8379 - RNA, 41 nt, synthetic construct
  source 1..41: mol_type = other RNA
gtccttccacgatactaaagctgtcatagatgaccttggcc

SEQ ID NO: 8380 - RNA, 41 nt, synthetic construct
  source 1..41: mol_type = other RNA
gactgtggtcatgagtccttccacgattacaagattgtcgt

SEQ ID NO: 8381 - RNA, 41 nt, synthetic construct
  source 1..41: mol_type = other RNA
gtccttccacaatatcaaagctgtcatggatgaccttggcc

SEQ ID NO: 8382 - RNA, 41 nt, synthetic construct
  source 1..41: mol_type = other RNA
gactgtggtcatgagtccttacacgttaccaaagttgtcat

SEQ ID NO: 8383 - RNA, 41 nt, synthetic construct
  source 1..41: mol_type = other RNA
gtccttccacgataccggagctgtcatagatgaccttggcc

SEQ ID NO: 8384 - RNA, 41 nt, synthetic construct
  source 1..41: mol_type = other RNA
gtccttccacgataccaaggctgtcatggatgaccttggcc

SEQ ID NO: 8385 - RNA, 45 nt, synthetic construct
  source 1..45: mol_type = other RNA
gtccttccacgattccgaagctgttataaaaagatgaccttggcc

SEQ ID NO: 8386 - RNA, 40 nt, synthetic construct
  source 1..40: mol_type = other RNA
gactgtggtcatgagtccttaaccgatacaaaagtttcat

SEQ ID NO: 8387 - RNA, 41 nt, synthetic construct
  source 1..41: mol_type = other RNA
gtccttccactataccaaagctgtcatggatgaccttggcc

SEQ ID NO: 8388 - RNA, 41 nt, synthetic construct
  source 1..41: mol_type = other RNA
ccaaggctgttatggatgaccttggccaggggtgctaagca

SEQ ID NO: 8389 - RNA, 40 nt, synthetic construct
  source 1..40: mol_type = other RNA
ccaaagcagtcatggtgaccttggccaggggtgctaagca

SEQ ID NO: 8390 - RNA, 41 nt, synthetic construct
  source 1..41: mol_type = other RNA
gtccttccaccatacaagagttgtcctggatgaccttggcc

SEQ ID NO: 8391 - RNA, 41 nt, synthetic construct
  source 1..41: mol_type = other RNA
gtccttccacgctcgcaaagctgtcatgggtgaccttggcc

SEQ ID NO: 8392 - RNA, 41 nt, synthetic construct
  source 1..41: mol_type = other RNA
gtccttccacgatactaaagctgtcgtggatgaccttggcc

SEQ ID NO: 8393 - RNA, 41 nt, synthetic construct
  source 1..41: mol_type = other RNA
cgagagctgtcatgggtgaccttggccaggggtgctaagca

SEQ ID NO: 8394 - RNA, 40 nt, synthetic construct
  source 1..40: mol_type = other RNA
caaaagtttcatggatgaacttggccaggggtgctaagca

SEQ ID NO: 8395 - RNA, 42 nt, synthetic construct
  source 1..42: mol_type = other RNA
gactgtggtcatgagtccttccacgatacccaaaactgtcat

SEQ ID NO: 8396 - RNA, 41 nt, synthetic construct
  source 1..41: mol_type = other RNA
gtccttccacgataccaaagctataatggctgaccttggcc

SEQ ID NO: 8397 - RNA, 41 nt, synthetic construct
  source 1..41: mol_type = other RNA
gtccttccactatatcaaagctgtcatggatgaccttggcc

SEQ ID NO: 8398 - RNA, 41 nt, synthetic construct
  source 1..41: mol_type = other RNA
gactgtggtcatgagtccttcaatgaataccaaagctgtat

SEQ ID NO: 8399 - RNA, 41 nt, synthetic construct
  source 1..41: mol_type = other RNA
gactgtggtcatgagtccttccaaaatactaaagatgtcat

SEQ ID NO: 8400 - RNA, 41 nt, synthetic construct
  source 1..41: mol_type = other RNA
gtccttccacgttaccaaagttgtcatggctgaccttggcc

SEQ ID NO: 8401 - RNA, 41 nt, synthetic construct
  source 1..41: mol_type = other RNA
gtccttccacgatatccaagctgtcatcgatgaccttggcc

SEQ ID NO: 8402 - RNA, 41 nt, synthetic construct
  source 1..41: mol_type = other RNA
gactgtggtcatgagtccttccacgattccaaagctgtcct

SEQ ID NO: 8403 - RNA, 41 nt, synthetic construct
  source 1..41: mol_type = other RNA
caaaagttgtcatgggtgcccttggccaggggtgctaagca

SEQ ID NO: 8404 - RNA, 41 nt, synthetic construct
  source 1..41: mol_type = other RNA
gactgtggtcatgagtccttccacgatacccaagcggtcat

SEQ ID NO: 8405 - RNA, 40 nt, synthetic construct
  source 1..40: mol_type = other RNA
gtccttccacactatcggagctgtcataatgaccttggcc

SEQ ID NO: 8406 - RNA, 40 nt, synthetic construct
  source 1..40: mol_type = other RNA
ccaacctgtcatggatgaccttggccaggggtgctaagca

SEQ ID NO: 8407 - RNA, 41 nt, synthetic construct
  source 1..41: mol_type = other RNA
acagagttatcatggctgcccttggccaggggtgctaagca

SEQ ID NO: 8408 - RNA, 41 nt, synthetic construct
  source 1..41: mol_type = other RNA
gactgtggtcatgagtccttccacgataccaaagctgtcgt

SEQ ID NO: 8409 - RNA, 41 nt, synthetic construct
  source 1..41: mol_type = other RNA
gactgtggtcatgagtccttctaagatatcaaagttgtcag

SEQ ID NO: 8410 - RNA, 41 nt, synthetic construct
  source 1..41: mol_type = other RNA
gtccttccacgataccagggttatcatggctgaccttggcc

SEQ ID NO: 8411 - RNA, 41 nt, synthetic construct
  source 1..41: mol_type = other RNA
gtccttccacgatactaacgttgtcatgaatgaccttggcc

SEQ ID NO: 8412 - RNA, 41 nt, synthetic construct
  source 1..41: mol_type = other RNA
cgaacgctgtcatggatgacattggccaggggtgctaagca

SEQ ID NO: 8413 - RNA, 41 nt, synthetic construct
  source 1..41: mol_type = other RNA
gtccttccacgatacaaacgttgtcatggatgaccttggcc

SEQ ID NO: 8414 - RNA, 41 nt, synthetic construct
  source 1..41: mol_type = other RNA
gtccttccacaataccccagctgtcatagatgaccttggcc

SEQ ID NO: 8415 - RNA, 41 nt, synthetic construct
  source 1..41: mol_type = other RNA
ccaaagctgtcatggatgacgttggccaggggtgctaagca

SEQ ID NO: 8416 - RNA, 41 nt, synthetic construct
  source 1..41: mol_type = other RNA
gtccttccacgatactaaagttgtcatcgatgaccttggcc

SEQ ID NO: 8417 - RNA, 42 nt, synthetic construct
  source 1..42: mol_type = other RNA
ccaaagttgttcgcggttgaccttggccaggggtgctaagca

SEQ ID NO: 8418 - RNA, 41 nt, synthetic construct
  source 1..41: mol_type = other RNA
gactgtggtcatgagtccttccacgataccaacgttgtcat

SEQ ID NO: 8419 - RNA, 41 nt, synthetic construct
  source 1..41: mol_type = other RNA
gactgtggtcatgagtccttccacgctaccccagttgtcat

SEQ ID NO: 8420 - RNA, 40 nt, synthetic construct
  source 1..40: mol_type = other RNA
gtccttccacgatactaaagcttcatggaagaccttggcc

SEQ ID NO: 8421 - RNA, 40 nt, synthetic construct
  source 1..40: mol_type = other RNA
gactgtggtcatgagtccttcaatactaccacagctgtcg

SEQ ID NO: 8422 - RNA, 41 nt, synthetic construct
  source 1..41: mol_type = other RNA
gtccttccacaatactaaagatgtcatggatgaccttggcc

SEQ ID NO: 8423 - RNA, 41 nt, synthetic construct
  source 1..41: mol_type = other RNA
ccaaagctgtcctggatgaccttggccaggggtgctaagca

SEQ ID NO: 8424 - RNA, 41 nt, synthetic construct
  source 1..41: mol_type = other RNA
gactgtggtcatgagtccttccgcgatatcaacgttgtcat

SEQ ID NO: 8425 - RNA, 41 nt, synthetic construct
  source 1..41: mol_type = other RNA
gactgtggtcatgagtccttccacgataacaaaattgtcat

SEQ ID NO: 8426 - RNA, 42 nt, synthetic construct
  source 1..42: mol_type = other RNA
gactgtggtcatgagtccttccacaactaccaaagctgtttt

SEQ ID NO: 8427 - RNA, 41 nt, synthetic construct
  source 1..41: mol_type = other RNA
gactgtggtcatgagtccttccatcatacaagagttgtcct

SEQ ID NO: 8428 - RNA, 41 nt, synthetic construct
  source 1..41: mol_type = other RNA
gactgtggtcatgagtccttccaagatactaaagttgtcct

SEQ ID NO: 8429 - RNA, 41 nt, synthetic construct
  source 1..41: mol_type = other RNA
gtccttccacgatcacagagttatcatggctgaccttggcc

SEQ ID NO: 8430 - RNA, 41 nt, synthetic construct
  source 1..41: mol_type = other RNA
ccaaagctatcatggataatcttggccaggggtgctaagca

SEQ ID NO: 8431 - RNA, 42 nt, synthetic construct
  source 1..42: mol_type = other RNA
gactgtggtcatgagtccttccacgatacctaaagctgtaat

SEQ ID NO: 8432 - RNA, 41 nt, synthetic construct
  source 1..41: mol_type = other RNA
gtccttccacgatgaaaaagctgtcatggatgaccttggcc

SEQ ID NO: 8433 - RNA, 41 nt, synthetic construct
  source 1..41: mol_type = other RNA
gactgtggtcatgagtccttgcacgataccaaagttgttat

SEQ ID NO: 8434 - RNA, 41 nt, synthetic construct
  source 1..41: mol_type = other RNA
gtccttccacgataccagagttgtcatcgatgaccttggcc

SEQ ID NO: 8435 - RNA, 41 nt, synthetic construct
  source 1..41: mol_type = other RNA
ccaaagctgtcacgggtgaccttggccaggggtgctaagca

SEQ ID NO: 8436 - RNA, 41 nt, synthetic construct
  source 1..41: mol_type = other RNA
gactgtggtcatgagtccttccacgatcccaaagctgtcgc

SEQ ID NO: 8437 - RNA, 40 nt, synthetic construct
  source 1..40: mol_type = other RNA
gactgtggtcatgagtccttcaattctaccacagctgtcg

SEQ ID NO: 8438 - RNA, 41 nt, synthetic construct
  source 1..41: mol_type = other RNA
gtccttccacgataccaaagttgtcatggatgaccttggcc

SEQ ID NO: 8439 - RNA, 41 nt, synthetic construct
  source 1..41: mol_type = other RNA
gtccttccacgatactaacgttgtcatgggggaccttggcc

SEQ ID NO: 8440 - RNA, 42 nt, synthetic construct
  source 1..42: mol_type = other RNA
gactgtggtcatgagtccttccacgatacccaaaattgtcat

SEQ ID NO: 8441 - RNA, 40 nt, synthetic construct
  source 1..40: mol_type = other RNA
gtccttccacgatacaaaagcttcatggatgaccttggcc

SEQ ID NO: 8442 - RNA, 39 nt, synthetic construct
  source 1..39: mol_type = other RNA
gtccttccacgataccatagctggtggatgaccttggcc

SEQ ID NO: 8443 - RNA, 40 nt, synthetic construct
  source 1..40: mol_type = other RNA
ctaaagctgtcatggatgacttggccaggggtgctaagca

SEQ ID NO: 8444 - RNA, 41 nt, synthetic construct
  source 1..41: mol_type = other RNA
gtccttccacgatattaaggttgtcgtggatgaccttggcc

SEQ ID NO: 8445 - RNA, 41 nt, synthetic construct
  source 1..41: mol_type = other RNA
gactgtggtcatgagtccttccaaaataccagagttgtaat

SEQ ID NO: 8446 - RNA, 41 nt, synthetic construct
  source 1..41: mol_type = other RNA
gactgtggtcatgagtccttctacgataccaaggttgtcgt

SEQ ID NO: 8447 - RNA, 41 nt, synthetic construct
  source 1..41: mol_type = other RNA
gtccttccacggtaattgagttgtcatgggtgaccttggcc

SEQ ID NO: 8448 - RNA, 41 nt, synthetic construct
  source 1..41: mol_type = other RNA
gtccttccacaataccggagttgtaatggatgaccttggcc

SEQ ID NO: 8449 - RNA, 41 nt, synthetic construct
  source 1..41: mol_type = other RNA
gactgtggtcatgagtccttccaagttaccaaatctgtcat

SEQ ID NO: 8450 - RNA, 41 nt, synthetic construct
  source 1..41: mol_type = other RNA
gtccttccacggtaccaaggttgtaatggatgaccttggcc

SEQ ID NO: 8451 - RNA, 41 nt, synthetic construct
  source 1..41: mol_type = other RNA
gactgtggtcatgagtccttccccgataccaatgctgcaat

SEQ ID NO: 8452 - RNA, 41 nt, synthetic construct
  source 1..41: mol_type = other RNA
gtccttccacgatcacagagttatcattgctgaccttggcc

SEQ ID NO: 8453 - RNA, 41 nt, synthetic construct
  source 1..41: mol_type = other RNA
gtccttccacgattccaaagctgtcatggatgaccttggcc

SEQ ID NO: 8454 - RNA, 41 nt, synthetic construct
  source 1..41: mol_type = other RNA
gtccttccacgataccaaaactgccatggatgaccttggcc

SEQ ID NO: 8455 - RNA, 41 nt, synthetic construct
  source 1..41: mol_type = other RNA
gtccttccacgattacaaagctgtcatggatgaccttggcc

SEQ ID NO: 8456 - RNA, 42 nt, synthetic construct
  source 1..42: mol_type = other RNA
gactgtggtcatgagtccttccatgataccaaagctgaccat

SEQ ID NO: 8457 - RNA, 41 nt, synthetic construct
  source 1..41: mol_type = other RNA
gactgtggtcatgagtccttccacgataacaaaactgtcat

SEQ ID NO: 8458 - RNA, 41 nt, synthetic construct
  source 1..41: mol_type = other RNA
gactgtggtcatgagtccttccacgataccaaagcagtcat

SEQ ID NO: 8459 - RNA, 42 nt, synthetic construct
  source 1..42: mol_type = other RNA
gtccttccacgataccaaagctgaccatggatgaccttggcc

SEQ ID NO: 8460 - RNA, 41 nt, synthetic construct
  source 1..41: mol_type = other RNA
gtccttccacgataacacagttgttgtggatgaccttggcc

SEQ ID NO: 8461 - RNA, 41 nt, synthetic construct
  source 1..41: mol_type = other RNA
tcagagctgaaatggacgaccttggccaggggtgctaagca

SEQ ID NO: 8462 - RNA, 41 nt, synthetic construct
  source 1..41: mol_type = other RNA
gtccttccacgatacccaagttgtaatgaatgaccttggcc

SEQ ID NO: 8463 - RNA, 42 nt, synthetic construct
  source 1..42: mol_type = other RNA
gactgtggtcatgagtccttccccgacgaccaagttgtcgat

SEQ ID NO: 8464 - RNA, 41 nt, synthetic construct
  source 1..41: mol_type = other RNA
caaaagctgtcatggatgaccttggccaggggtgctaagca

SEQ ID NO: 8465 - RNA, 41 nt, synthetic construct
  source 1..41: mol_type = other RNA
ttaaggttgtcgtggatgaccttggccaggggtgctaagca

SEQ ID NO: 8466 - RNA, 41 nt, synthetic construct
  source 1..41: mol_type = other RNA
gactgtggtcatgagtccttctgcgataccaagattgtcat

SEQ ID NO: 8467 - RNA, 41 nt, synthetic construct
  source 1..41: mol_type = other RNA
gtccttccacgatactaatgttgcaatggacgaccttggcc

SEQ ID NO: 8468 - RNA, 41 nt, synthetic construct
  source 1..41: mol_type = other RNA
gtccttccacgatgtcaaagctgtcatggatgaccttggcc

SEQ ID NO: 8469 - RNA, 42 nt, synthetic construct
  source 1..42: mol_type = other RNA
cgcaaagttgtcatgggtgaccttggccaggggtgctaagca

SEQ ID NO: 8470 - RNA, 41 nt, synthetic construct
  source 1..41: mol_type = other RNA
gtccttccacgctactaaagttgttatcgatgaccttggcc

SEQ ID NO: 8471 - RNA, 42 nt, synthetic construct
  source 1..42: mol_type = other RNA
gtccttccacgatgaaaaagttgtcgatggttgaccttggcc

SEQ ID NO: 8472 - RNA, 41 nt, synthetic construct
  source 1..41: mol_type = other RNA
ccaaagctgtcacggatgattttggccaggggtgctaagca

SEQ ID NO: 8473 - RNA, 41 nt, synthetic construct
  source 1..41: mol_type = other RNA
ccacagctgtcatggatgaccttggccaggggtgctaagca

SEQ ID NO: 8474 - RNA, 42 nt, synthetic construct
  source 1..42: mol_type = other RNA
ccaaagctgaccatggatgaccttggccaggggtgctaagca

SEQ ID NO: 8475 - RNA, 41 nt, synthetic construct
  source 1..41: mol_type = other RNA
gactgtggtcatgagtccttccacgatgccaaagttgtccg

SEQ ID NO: 8476 - RNA, 41 nt, synthetic construct
  source 1..41: mol_type = other RNA
ctaaagttgtcatcgatggccttggccaggggtgctaagca

SEQ ID NO: 8477 - RNA, 41 nt, synthetic construct
  source 1..41: mol_type = other RNA
gactgtggtcatgagtccttccacgataccaaagttgttat

SEQ ID NO: 8478 - RNA, 41 nt, synthetic construct
  source 1..41: mol_type = other RNA
caaacgctgtcatggatgcccttggccaggggtgctaagca

SEQ ID NO: 8479 - RNA, 41 nt, synthetic construct
  source 1..41: mol_type = other RNA
gtccttccacgctaccacagttgtcatggatgaccttggcc

SEQ ID NO: 8480 - RNA, 41 nt, synthetic construct
  source 1..41: mol_type = other RNA
ctaaagctgttatcgatggccttggccaggggtgctaagca

SEQ ID NO: 8481 - RNA, 41 nt, synthetic construct
  source 1..41: mol_type = other RNA
ccaaagctgtcatggctgaccttggccaggggtgctaagca

SEQ ID NO: 8482 - RNA, 41 nt, synthetic construct
  source 1..41: mol_type = other RNA
ccagagctgtcatcgatgaccttggccaggggtgctaagca

SEQ ID NO: 8483 - RNA, 41 nt, synthetic construct
  source 1..41: mol_type = other RNA
gtccttccacgataccaaggatgtcatggatgaccttggcc

SEQ ID NO: 8484 - RNA, 41 nt, synthetic construct
  source 1..41: mol_type = other RNA
gtccttccacgataccaaaaatgccatggatgaccttggcc

SEQ ID NO: 8485 - RNA, 42 nt, synthetic construct
  source 1..42: mol_type = other RNA
gtccttccacgacgaccaagctgtcgatggctgaccttggcc

SEQ ID NO: 8486 - RNA, 42 nt, synthetic construct
  source 1..42: mol_type = other RNA
gactgtggtcatgagtccttctccgatgaaaaagttgtcgat

SEQ ID NO: 8487 - RNA, 41 nt, synthetic construct
  source 1..41: mol_type = other RNA
ccaaagttgtcatggatgacgttggccaggggtgctaagca

SEQ ID NO: 8488 - RNA, 39 nt, synthetic construct
  source 1..39: mol_type = other RNA
ccatagctggtggatgaccttggccaggggtgctaagca

SEQ ID NO: 8489 - RNA, 41 nt, synthetic construct
  source 1..41: mol_type = other RNA
gtccttccacgctcgcaaagttgtcatgggtgaccttggcc

SEQ ID NO: 8490 - RNA, 41 nt, synthetic construct
  source 1..41: mol_type = other RNA
gactgtggtcatgagtccttccacgataccaaagttataat

SEQ ID NO: 8491 - RNA, 41 nt, synthetic construct
  source 1..41: mol_type = other RNA
gactgtggtcatgagtccttccacgatacccaagttgtaat

SEQ ID NO: 8492 - RNA, 42 nt, synthetic construct
  source 1..42: mol_type = other RNA
ccgaaactgttcgtcgatggccttggccaggggtgctaagca

SEQ ID NO: 8493 - RNA, 41 nt, synthetic construct
  source 1..41: mol_type = other RNA
gtccttccacactaccggagctgttattaccgaccttggcc

SEQ ID NO: 8494 - RNA, 41 nt, synthetic construct
  source 1..41: mol_type = other RNA
acaaaattgtcatggatgaccttggccaggggtgctaagca

SEQ ID NO: 8495 - RNA, 41 nt, synthetic construct
  source 1..41: mol_type = other RNA
gtccttccacgataacaaaattgtcatggatgaccttggcc

SEQ ID NO: 8496 - RNA, 41 nt, synthetic construct
  source 1..41: mol_type = other RNA
gtccttccacgataacaaaactgtcatggatgaccttggcc

SEQ ID NO: 8497 - RNA, 41 nt, synthetic construct
  source 1..41: mol_type = other RNA
acaagactgtcgtggatggccttggccaggggtgctaagca

SEQ ID NO: 8498 - RNA, 41 nt, synthetic construct
  source 1..41: mol_type = other RNA
gtccttccacgatattaaagttgtcagggatgaccttggcc

SEQ ID NO: 8499 - RNA, 44 nt, synthetic construct
  source 1..44: mol_type = other RNA
agcaaaagctgtcatggataaaccttggccaggggtgctaagca

SEQ ID NO: 8500 - RNA, 42 nt, synthetic construct
  source 1..42: mol_type = other RNA
gtccttccactactatcaaagctgttttggctgaccttggcc

SEQ ID NO: 8501 - RNA, 41 nt, synthetic construct
  source 1..41: mol_type = other RNA
tccaagctgtcatcgatggctttggccaggggtgctaagca

SEQ ID NO: 8502 - RNA, 41 nt, synthetic construct
  source 1..41: mol_type = other RNA
gactgtggtcatgagtccttccccgataccaatgttgcaat

SEQ ID NO: 8503 - RNA, 41 nt, synthetic construct
  source 1..41: mol_type = other RNA
caaaaatcgtcatagacgaccttggccaggggtgctaagca

SEQ ID NO: 8504 - RNA, 41 nt, synthetic construct
  source 1..41: mol_type = other RNA
gtccttccacgatccaaaagctgtcatgggtgaccttggcc

SEQ ID NO: 8505 - RNA, 41 nt, synthetic construct
  source 1..41: mol_type = other RNA
gtccttccacgagcccacagctgtcatggatgaccttggcc

SEQ ID NO: 8506 - RNA, 39 nt, synthetic construct
  source 1..39: mol_type = other RNA
gactgtggtcatgagtccttccacgagaccaacgctgtc

SEQ ID NO: 8507 - RNA, 41 nt, synthetic construct
  source 1..41: mol_type = other RNA
gtccttccacgatacaaaagttgtcatatctgaccttggcc

SEQ ID NO: 8508 - RNA, 41 nt, synthetic construct
  source 1..41: mol_type = other RNA
ccaaagttgtcatggatgaccttggccaggggtgctaagca

SEQ ID NO: 8509 - RNA, 41 nt, synthetic construct
  source 1..41: mol_type = other RNA
ccaaagctgtcatggatgaccttggccaggggtgctaagca

SEQ ID NO: 8510 - RNA, 41 nt, synthetic construct
  source 1..41: mol_type = other RNA
gactgtggtcatgagtccttccacgataccaaagctggcat

SEQ ID NO: 8511 - RNA, 41 nt, synthetic construct
  source 1..41: mol_type = other RNA
ccaaagctgttatggctgaccttggccaggggtgctaagca

SEQ ID NO: 8512 - RNA, 41 nt, synthetic construct
  source 1..41: mol_type = other RNA
gactgtggtcatgagtccttccacgatcccaaagtggtcat

SEQ ID NO: 8513 - RNA, 41 nt, synthetic construct
  source 1..41: mol_type = other RNA
ctaaagttgtcatagatggccttggccaggggtgctaagca

SEQ ID NO: 8514 - RNA, 42 nt, synthetic construct
  source 1..42: mol_type = other RNA
gactgtggtcatgagtccttccatgataccaaagttgaccat

SEQ ID NO: 8515 - RNA, 42 nt, synthetic construct
  source 1..42: mol_type = other RNA
gactgtggtcatgagtccttccactactaccaaagttgtttt

SEQ ID NO: 8516 - RNA, 41 nt, synthetic construct
  source 1..41: mol_type = other RNA
ccggagctgtcatagatgacgttggccaggggtgctaagca

SEQ ID NO: 8517 - RNA, 41 nt, synthetic construct
  source 1..41: mol_type = other RNA
gtccttccacgatctccgagctgaaaccgatgaccttggcc

SEQ ID NO: 8518 - RNA, 41 nt, synthetic construct
  source 1..41: mol_type = other RNA
ataaagttatcatggctacccttggccaggggtgctaagca

SEQ ID NO: 8519 - RNA, 41 nt, synthetic construct
  source 1..41: mol_type = other RNA
gactgtggtcatgagtccttacacgataccaaagatgtcat

SEQ ID NO: 8520 - RNA, 41 nt, synthetic construct
  source 1..41: mol_type = other RNA
ccagagctgtcatggatgactttggccaggggtgctaagca

SEQ ID NO: 8521 - RNA, 41 nt, synthetic construct
  source 1..41: mol_type = other RNA
ctaatgctgcaatggacgaccttggccaggggtgctaagca

SEQ ID NO: 8522 - RNA, 42 nt, synthetic construct
  source 1..42: mol_type = other RNA
aaaaagctgtcgatggttgaccttggccaggggtgctaagca

SEQ ID NO: 8523 - RNA, 41 nt, synthetic construct
  source 1..41: mol_type = other RNA
gtccttccacgatgtcatagatgtcatagctgaccttggcc

SEQ ID NO: 8524 - RNA, 40 nt, synthetic construct
  source 1..40: mol_type = other RNA
gtccttccacactactacggctgtcgggttgaccttggcc

SEQ ID NO: 8525 - RNA, 41 nt, synthetic construct
  source 1..41: mol_type = other RNA
gtccttccacactaccggagctgttataaccgaccttggcc

SEQ ID NO: 8526 - RNA, 40 nt, synthetic construct
  source 1..40: mol_type = other RNA
gtccttccacgatacaaaagtttcatggatgaccttggcc

SEQ ID NO: 8527 - RNA, 41 nt, synthetic construct
  source 1..41: mol_type = other RNA
ccaaagccgtcatggatggccttggccaggggtgctaagca

SEQ ID NO: 8528 - RNA, 41 nt, synthetic construct
  source 1..41: mol_type = other RNA
ccaaagtcgtcatggatggccttggccaggggtgctaagca

SEQ ID NO: 8529 - RNA, 41 nt, synthetic construct
  source 1..41: mol_type = other RNA
gactgtggtcatgagtccttccacgattacaagactgtcgt

SEQ ID NO: 8530 - RNA, 43 nt, synthetic construct
  source 1..43: mol_type = other RNA
gtccttccacgattagcaaaagttgtcatggatgaccttggcc

SEQ ID NO: 8531 - RNA, 42 nt, synthetic construct
  source 1..42: mol_type = other RNA
ccaaagttgaccatggatgaccttggccaggggtgctaagca

SEQ ID NO: 8532 - RNA, 41 nt, synthetic construct
  source 1..41: mol_type = other RNA
acaaagctgtcatggatgaccttggccaggggtgctaagca

SEQ ID NO: 8533 - RNA, 41 nt, synthetic construct
  source 1..41: mol_type = other RNA
ccaaagctgtcatggatgacattggccaggggtgctaagca

SEQ ID NO: 8534 - RNA, 41 nt, synthetic construct
  source 1..41: mol_type = other RNA
ccaaagatgtcatggatgacattggccaggggtgctaagca

SEQ ID NO: 8535 - RNA, 41 nt, synthetic construct
  source 1..41: mol_type = other RNA
acacagctgttgtggatacccttggccaggggtgctaagca

SEQ ID NO: 8536 - RNA, 41 nt, synthetic construct
  source 1..41: mol_type = other RNA
ccaaagttgtcatggctgaccttggccaggggtgctaagca

SEQ ID NO: 8537 - RNA, 41 nt, synthetic construct
  source 1..41: mol_type = other RNA
ccaaagctgtcctggatgcaattggccaggggtgctaagca

SEQ ID NO: 8538 - RNA, 41 nt, synthetic construct
  source 1..41: mol_type = other RNA
caaaagctgtcatgggtgcccttggccaggggtgctaagca

SEQ ID NO: 8539 - RNA, 41 nt, synthetic construct
  source 1..41: mol_type = other RNA
ccaaggctgtaatggatgacgttggccaggggtgctaagca

SEQ ID NO: 8540 - RNA, 41 nt, synthetic construct
  source 1..41: mol_type = other RNA
ccaaggctgtcacggatgaccttggccaggggtgctaagca

SEQ ID NO: 8541 - RNA, 41 nt, synthetic construct
  source 1..41: mol_type = other RNA
gtccttccacgataccacagttgttatagatgaccttggcc

SEQ ID NO: 8542 - RNA, 41 nt, synthetic construct
  source 1..41: mol_type = other RNA
gtccttccacgacttgaaagctgtcaaggatgaccttggcc

SEQ ID NO: 8543 - RNA, 40 nt, synthetic construct
  source 1..40: mol_type = other RNA
gactgtggtcatgagtccttaaccgatctacaagtttcat

SEQ ID NO: 8544 - RNA, 50 nt, synthetic construct
  source 1..50: mol_type = other RNA
gtccttccacgatatgaaagctttcatgggctgtgactatgaccttggcc

SEQ ID NO: 8545 - RNA, 40 nt, synthetic construct
  source 1..40: mol_type = other RNA
caaaagtttcatggatggccttggccaggggtgctaagca

SEQ ID NO: 8546 - RNA, 42 nt, synthetic construct
  source 1..42: mol_type = other RNA
gactgtggtcatgagtccttccacgatacctaaagttgtaat

SEQ ID NO: 8547 - RNA, 41 nt, synthetic construct
  source 1..41: mol_type = other RNA
aaaaagctgtcatggatgaccttggccaggggtgctaagca

SEQ ID NO: 8548 - RNA, 41 nt, synthetic construct
  source 1..41: mol_type = other RNA
gactgtggtcatgagtccttccaagttaccaaatttgtcat

SEQ ID NO: 8549 - RNA, 39 nt, synthetic construct
  source 1..39: mol_type = other RNA
ccatagttggtggatgaccttggccaggggtgctaagca

SEQ ID NO: 8550 - RNA, 41 nt, synthetic construct
  source 1..41: mol_type = other RNA
acaacgctgtcatgggtgaccttggccaggggtgctaagca

SEQ ID NO: 8551 - RNA, 41 nt, synthetic construct
  source 1..41: mol_type = other RNA
ccaatgctgtcatggatgaccttggccaggggtgctaagca

SEQ ID NO: 8552 - RNA, 41 nt, synthetic construct
  source 1..41: mol_type = other RNA
ccccagttgtcatagatgaccttggccaggggtgctaagca

SEQ ID NO: 8553 - RNA, 41 nt, synthetic construct
  source 1..41: mol_type = other RNA
attgagctgtcatgggtgatgttggccaggggtgctaagca

SEQ ID NO: 8554 - RNA, 41 nt, synthetic construct
  source 1..41: mol_type = other RNA
ccagggctatcatggctgaccttggccaggggtgctaagca

SEQ ID NO: 8555 - RNA, 41 nt, synthetic construct
  source 1..41: mol_type = other RNA
gactgtggtcatgagtccttccacgatcccaaaactgtcct

SEQ ID NO: 8556 - RNA, 41 nt, synthetic construct
  source 1..41: mol_type = other RNA
ccagagctgtcattgacgaccttggccaggggtgctaagca

SEQ ID NO: 8557 - RNA, 41 nt, synthetic construct
  source 1..41: mol_type = other RNA
gtccttccacgattaaaaagctgtcatggctgaccttggcc

SEQ ID NO: 8558 - RNA, 41 nt, synthetic construct
  source 1..41: mol_type = other RNA
ccggagctgtaatggacgaccttggccaggggtgctaagca

SEQ ID NO: 8559 - RNA, 41 nt, synthetic construct
  source 1..41: mol_type = other RNA
gtccttccacgttaccaaatttgtcatggatgaccttggcc

SEQ ID NO: 8560 - RNA, 44 nt, synthetic construct
  source 1..44: mol_type = other RNA
agcaaaagttgtcatggataaaccttggccaggggtgctaagca

SEQ ID NO: 8561 - RNA, 41 nt, synthetic construct
  source 1..41: mol_type = other RNA
ccccagctgtcatgggtgaccttggccaggggtgctaagca

SEQ ID NO: 8562 - RNA, 42 nt, synthetic construct
  source 1..42: mol_type = other RNA
gtccttccacgataccaaagttgaccatggatgaccttggcc

SEQ ID NO: 8563 - RNA, 41 nt, synthetic construct
  source 1..41: mol_type = other RNA
ttaacgctgtcatggatggccttggccaggggtgctaagca

SEQ ID NO: 8564 - RNA, 41 nt, synthetic construct
  source 1..41: mol_type = other RNA
gactgtggtcatgagtccttccaggttgatagagcagtcat

SEQ ID NO: 8565 - RNA, 41 nt, synthetic construct
  source 1..41: mol_type = other RNA
cccaagctatcatggatgagcttggccaggggtgctaagca

SEQ ID NO: 8566 - RNA, 40 nt, synthetic construct
  source 1..40: mol_type = other RNA
gtccttccacatatcagagctgaaatggacgaccttggcc

SEQ ID NO: 8567 - RNA, 41 nt, synthetic construct
  source 1..41: mol_type = other RNA
acagagctgtcatggatcgccttggccaggggtgctaagca

SEQ ID NO: 8568 - RNA, 41 nt, synthetic construct
  source 1..41: mol_type = other RNA
ccgaagctgtatggttcgaccttggccaggggtgctaagca

SEQ ID NO: 8569 - RNA, 41 nt, synthetic construct
  source 1..41: mol_type = other RNA
tgaaagctgtcaaggatgagcttggccaggggtgctaagca

SEQ ID NO: 8570 - RNA, 41 nt, synthetic construct
  source 1..41: mol_type = other RNA
ccaaggctgtcgttgatggcgttggccaggggtgctaagca

SEQ ID NO: 8571 - RNA, 41 nt, synthetic construct
  source 1..41: mol_type = other RNA
cgtgagctgtcatgggtgatattggccaggggtgctaagca

SEQ ID NO: 8572 - RNA, 41 nt, synthetic construct
  source 1..41: mol_type = other RNA
ctaacgttgtcatggggtaccttggccaggggtgctaagca

SEQ ID NO: 8573 - RNA, 40 nt, synthetic construct
  source 1..40: mol_type = other RNA
gactgtggtcatgagtccttccacgataccaacttgtcat

SEQ ID NO: 8574 - RNA, 41 nt, synthetic construct
  source 1..41: mol_type = other RNA
gactgtggtcatgagtccttccaaaataccaaaactgtctt

SEQ ID NO: 8575 - RNA, 41 nt, synthetic construct
  source 1..41: mol_type = other RNA
acaagattgtcgtggatggccttggccaggggtgctaagca

SEQ ID NO: 8576 - RNA, 41 nt, synthetic construct
  source 1..41: mol_type = other RNA
gtccttccacgttaccaaatctgtcatggatgaccttggcc

SEQ ID NO: 8577 - RNA, 41 nt, synthetic construct
  source 1..41: mol_type = other RNA
ccaaggctgtcgtggatggccttggccaggggtgctaagca

SEQ ID NO: 8578 - RNA, 41 nt, synthetic construct
  source 1..41: mol_type = other RNA
ccacagttgtcatggatgaccttggccaggggtgctaagca

SEQ ID NO: 8579 - RNA, 41 nt, synthetic construct
  source 1..41: mol_type = other RNA
ttaacgttgtcatggatggccttggccaggggtgctaagca

SEQ ID NO: 8580 - RNA, 41 nt, synthetic construct
  source 1..41: mol_type = other RNA
ctaaagctgtcctggattaccttggccaggggtgctaagca

SEQ ID NO: 8581 - RNA, 41 nt, synthetic construct
  source 1..41: mol_type = other RNA
ataaagctatcatggcttcccttggccaggggtgctaagca

SEQ ID NO: 8582 - RNA, 41 nt, synthetic construct
  source 1..41: mol_type = other RNA
tccaagttgtcatcgatggctttggccaggggtgctaagca

SEQ ID NO: 8583 - RNA, 41 nt, synthetic construct
  source 1..41: mol_type = other RNA
acttagctatcatggctgaccttggccaggggtgctaagca

SEQ ID NO: 8584 - RNA, 41 nt, synthetic construct
  source 1..41: mol_type = other RNA
acagagttatcattgctgaccttggccaggggtgctaagca

SEQ ID NO: 8585 - RNA, 41 nt, synthetic construct
  source 1..41: mol_type = other RNA
tcatagatgtcatagctgaccttggccaggggtgctaagca

SEQ ID NO: 8586 - RNA, 39 nt, synthetic construct
  source 1..39: mol_type = other RNA
gactgtggtcatgagtccttgcacgataccatagctgat

SEQ ID NO: 8587 - RNA, 41 nt, synthetic construct
  source 1..41: mol_type = other RNA
ctaaagttgttatcgatggccttggccaggggtgctaagca

SEQ ID NO: 8588 - RNA, 42 nt, synthetic construct
  source 1..42: mol_type = other RNA
gtccttccacgatgccaaagctgttcgcggttgaccttggcc

SEQ ID NO: 8589 - RNA, 42 nt, synthetic construct
  source 1..42: mol_type = other RNA
gtccttccacgataccaaaaccgtcgtggggtgaccttggcc

SEQ ID NO: 8590 - RNA, 41 nt, synthetic construct
  source 1..41: mol_type = other RNA
gactgtggtcatgagtccttctgcgataccaagactgtcat

SEQ ID NO: 8591 - RNA, 41 nt, synthetic construct
  source 1..41: mol_type = other RNA
gactgtggtcatgagtccttccagaatacaaaaaccgtcat

SEQ ID NO: 8592 - RNA, 41 nt, synthetic construct
  source 1..41: mol_type = other RNA
ccaaagctgtcatggatgcaattggccaggggtgctaagca

SEQ ID NO: 8593 - RNA, 41 nt, synthetic construct
  source 1..41: mol_type = other RNA
tcaaagctgtcctggatggccttggccaggggtgctaagca

SEQ ID NO: 8594 - RNA, 41 nt, synthetic construct
  source 1..41: mol_type = other RNA
ccaatgctgtcatggaagacattggccaggggtgctaagca

SEQ ID NO: 8595 - RNA, 39 nt, synthetic construct
  source 1..39: mol_type = other RNA
gactgtggtcatgagtccttcagataccaaaaatgccat

SEQ ID NO: 8596 - RNA, 40 nt, synthetic construct
  source 1..40: mol_type = other RNA
gtccttccactctactacggctgtcgggttgaccttggcc

SEQ ID NO: 8597 - RNA, 45 nt, synthetic construct
  source 1..45: mol_type = other RNA
gactgtggtcatgagtccttccacgaaaccaaaagagtctgtcat

SEQ ID NO: 8598 - RNA, 45 nt, synthetic construct
  source 1..45: mol_type = other RNA
ccaaaagagtttgtcatggatggccttggccaggggtgctaagca

SEQ ID NO: 8599 - RNA, 41 nt, synthetic construct
  source 1..41: mol_type = other RNA
ccggagttgtaatggatgaccttggccaggggtgctaagca

SEQ ID NO: 8600 - RNA, 41 nt, synthetic construct
  source 1..41: mol_type = other RNA
gtccttccacgctaccccagttgtcatgggtgaccttggcc

SEQ ID NO: 8601 - RNA, 42 nt, synthetic construct
  source 1..42: mol_type = other RNA
cgcaaagctgtcatgggtgaccttggccaggggtgctaagca

SEQ ID NO: 8602 - RNA, 41 nt, synthetic construct
  source 1..41: mol_type = other RNA
ccgaagttgtcatggataaccttggccaggggtgctaagca

SEQ ID NO: 8603 - RNA, 42 nt, synthetic construct
  source 1..42: mol_type = other RNA
gactgtggtcatgagtccttccacggtaccaaagctgttcat

SEQ ID NO: 8604 - RNA, 41 nt, synthetic construct
  source 1..41: mol_type = other RNA
tcaaagctgttttggctgaccttggccaggggtgctaagca

SEQ ID NO: 8605 - RNA, 41 nt, synthetic construct
  source 1..41: mol_type = other RNA
ccaaagctgtcatggatgatcttggccaggggtgctaagca

SEQ ID NO: 8606 - RNA, 41 nt, synthetic construct
  source 1..41: mol_type = other RNA
acacagttgttgtggatacccttggccaggggtgctaagca

SEQ ID NO: 8607 - RNA, 40 nt, synthetic construct
  source 1..40: mol_type = other RNA
ctaaagcttcatggaagacgttggccaggggtgctaagca

SEQ ID NO: 8608 - RNA, 42 nt, synthetic construct
  source 1..42: mol_type = other RNA
ccaaaaccgtcgtggggtgaccttggccaggggtgctaagca

SEQ ID NO: 8609 - RNA, 41 nt, synthetic construct
  source 1..41: mol_type = other RNA
gtccttccacaataccccagttgtcatagatgaccttggcc

SEQ ID NO: 8610 - RNA, 41 nt, synthetic construct
  source 1..41: mol_type = other RNA
gactgtggtcatgagtccttccacgatctccgagttgaaac

SEQ ID NO: 8611 - RNA, 41 nt, synthetic construct
  source 1..41: mol_type = other RNA
ccaaggctgtcatggatgacattggccaggggtgctaagca

SEQ ID NO: 8612 - RNA, 41 nt, synthetic construct
  source 1..41: mol_type = other RNA
caaaaaccgtcatagacgaccttggccaggggtgctaagca

SEQ ID NO: 8613 - RNA, 41 nt, synthetic construct
  source 1..41: mol_type = other RNA
ccaaaactgacataactgaccttggccaggggtgctaagca

SEQ ID NO: 8614 - RNA, 41 nt, synthetic construct
  source 1..41: mol_type = other RNA
ccaaaattgacataactgaccttggccaggggtgctaagca

SEQ ID NO: 8615 - RNA, 41 nt, synthetic construct
  source 1..41: mol_type = other RNA
gtccttccacgttaccaaaattgacataactgaccttggcc

SEQ ID NO: 8616 - RNA, 42 nt, synthetic construct
  source 1..42: mol_type = other RNA
aaaaagttgtcgatggttgaccttggccaggggtgctaagca

SEQ ID NO: 8617 - RNA, 41 nt, synthetic construct
  source 1..41: mol_type = other RNA
ctaaagctgtcgcggatgcccttggccaggggtgctaagca

SEQ ID NO: 8618 - RNA, 43 nt, synthetic construct
  source 1..43: mol_type = other RNA
cgaaagctgtcatggatgaccacttggccaggggtgctaagca

SEQ ID NO: 8619 - RNA, 41 nt, synthetic construct
  source 1..41: mol_type = other RNA
gtccttccacgacataacagctgtcatgaatgaccttggcc

SEQ ID NO: 8620 - RNA, 40 nt, synthetic construct
  source 1..40: mol_type = other RNA
gactgtggtcatgagtccttaaccgatctacaagcttcat

SEQ ID NO: 8621 - RNA, 40 nt, synthetic construct
  source 1..40: mol_type = other RNA
tacaagcttcatggatggagttggccaggggtgctaagca

SEQ ID NO: 8622 - RNA, 41 nt, synthetic construct
  source 1..41: mol_type = other RNA
tcggagctgtcgtggacaacgttggccaggggtgctaagca

SEQ ID NO: 8623 - RNA, 40 nt, synthetic construct
  source 1..40: mol_type = other RNA
ccaacttgtcatggatgaccttggccaggggtgctaagca

SEQ ID NO: 8624 - RNA, 52 nt, synthetic construct
  source 1..52: mol_type = other RNA
gtccttccacgataccaaagttgccatggcatgcgccaccatgaccttggcc

SEQ ID NO: 8625 - RNA, 41 nt, synthetic construct
  source 1..41: mol_type = other RNA
ccaaagctataatggctgaccttggccaggggtgctaagca

SEQ ID NO: 8626 - RNA, 40 nt, synthetic construct
  source 1..40: mol_type = other RNA
gtccttccacgtcccaaagctgtcatggatgaccttggcc

SEQ ID NO: 8627 - RNA, 41 nt, synthetic construct
  source 1..41: mol_type = other RNA
ccagagttgtcatcgatgaccttggccaggggtgctaagca

SEQ ID NO: 8628 - RNA, 41 nt, synthetic construct
  source 1..41: mol_type = other RNA
attgagttgtcatgggtgatgttggccaggggtgctaagca

SEQ ID NO: 8629 - RNA, 42 nt, synthetic construct
  source 1..42: mol_type = other RNA
gactgtggtcatgagtccttccacggtaccaaaactgttcat

SEQ ID NO: 8630 - RNA, 37 nt, synthetic construct
  source 1..37: mol_type = other RNA
ccaacgctgtcgtgaccttggccaggggtgctaagca

SEQ ID NO: 8631 - RNA, 41 nt, synthetic construct
  source 1..41: mol_type = other RNA
tcggagctgtcataatgtactttggccaggggtgctaagca

SEQ ID NO: 8632 - RNA, 42 nt, synthetic construct
  source 1..42: mol_type = other RNA
accaagctgtcgatggctcaccttggccaggggtgctaagca

SEQ ID NO: 8633 - RNA, 43 nt, synthetic construct
  source 1..43: mol_type = other RNA
ctaaagctgtcagaatcatgacattggccaggggtgctaagca

SEQ ID NO: 8634 - RNA, 40 nt, synthetic construct
  source 1..40: mol_type = other RNA
gactgtggtcatgagtccttccacgataccaacctgtcat

SEQ ID NO: 8635 - RNA, 41 nt, synthetic construct
  source 1..41: mol_type = other RNA
ccaaaactgtcatggctgaccttggccaggggtgctaagca

SEQ ID NO: 8636 - RNA, 41 nt, synthetic construct
  source 1..41: mol_type = other RNA
ccaaatctgtcatggatgaccttggccaggggtgctaagca

SEQ ID NO: 8637 - RNA, 41 nt, synthetic construct
  source 1..41: mol_type = other RNA
tcaaagctgtcatggatggccttggccaggggtgctaagca

SEQ ID NO: 8638 - RNA, 41 nt, synthetic construct
  source 1..41: mol_type = other RNA
tccgagctgaaaccgatgaccttggccaggggtgctaagca

SEQ ID NO: 8639 - RNA, 43 nt, synthetic construct
  source 1..43: mol_type = other RNA
cataagctgtcagagattagaccttggccaggggtgctaagca

SEQ ID NO: 8640 - RNA, 41 nt, synthetic construct
  source 1..41: mol_type = other RNA
ccaaggatgtcatggatgacattggccaggggtgctaagca

SEQ ID NO: 8641 - RNA, 41 nt, synthetic construct
  source 1..41: mol_type = other RNA
ttaaggctgtcgtggatgaccttggccaggggtgctaagca

SEQ ID NO: 8642 - RNA, 41 nt, synthetic construct
  source 1..41: mol_type = other RNA
ccaagactgtcatggatacccttggccaggggtgctaagca

SEQ ID NO: 8643 - RNA, 41 nt, synthetic construct
  source 1..41: mol_type = other RNA
gtccttccacgataccaagattgtcatggatgaccttggcc

SEQ ID NO: 8644 - RNA, 37 nt, synthetic construct
  source 1..37: mol_type = other RNA
gtccttccacgagaccaacgctgtcgtgaccttggcc

SEQ ID NO: 8645 - RNA, 40 nt, synthetic construct
  source 1..40: mol_type = other RNA
caaaagcttcatggatgaacttggccaggggtgctaagca

SEQ ID NO: 8646 - RNA, 41 nt, synthetic construct
  source 1..41: mol_type = other RNA
aaaaagctgtcatggctgcgcttggccaggggtgctaagca

SEQ ID NO: 8647 - RNA, 41 nt, synthetic construct
  source 1..41: mol_type = other RNA
aaacctgtcatggatagaacgttggccaggggtgctaagca

SEQ ID NO: 8648 - RNA, 41 nt, synthetic construct
  source 1..41: mol_type = other RNA
ccggagctgttattacccactttggccaggggtgctaagca

SEQ ID NO: 8649 - RNA, 41 nt, synthetic construct
  source 1..41: mol_type = other RNA
acaaaactgtcatggatgaccttggccaggggtgctaagca

SEQ ID NO: 8650 - RNA, 40 nt, synthetic construct
  source 1..40: mol_type = other RNA
gtccttccacgataccaacttgtcatggatgaccttggcc

SEQ ID NO: 8651 - RNA, 41 nt, synthetic construct
  source 1..41: mol_type = other RNA
ccaaaattgtcatggctgaccttggccaggggtgctaagca

SEQ ID NO: 8652 - RNA, 41 nt, synthetic construct
  source 1..41: mol_type = other RNA
gtccttccacgatcccaaagtggtcatgaatgaccttggcc

SEQ ID NO: 8653 - RNA, 41 nt, synthetic construct
  source 1..41: mol_type = other RNA
gtccttccacaataccaaaactgtcttgggcgaccttggcc

SEQ ID NO: 8654 - RNA, 41 nt, synthetic construct
  source 1..41: mol_type = other RNA
gactgtggtcatgagtccttccgcactaccaacactgtcat

SEQ ID NO: 8655 - RNA, 41 nt, synthetic construct
  source 1..41: mol_type = other RNA
ccggagctgtcaaggacgaccttggccaggggtgctaagca

SEQ ID NO: 8656 - RNA, 41 nt, synthetic construct
  source 1..41: mol_type = other RNA
ccgaagctgtcatggataaccttggccaggggtgctaagca

SEQ ID NO: 8657 - RNA, 41 nt, synthetic construct
  source 1..41: mol_type = other RNA
gtccttccacgctcccaaacctgacatggatgaccttggcc

SEQ ID NO: 8658 - RNA, 42 nt, synthetic construct
  source 1..42: mol_type = other RNA
gtccttccacggtaccgaggctgttcgtggatgaccttggcc

SEQ ID NO: 8659 - RNA, 42 nt, synthetic construct
  source 1..42: mol_type = other RNA
caaaaagctgccatggctgaaattggccaggggtgctaagca

SEQ ID NO: 8660 - RNA, 41 nt, synthetic construct
  source 1..41: mol_type = other RNA
cccaagctgtaatgaatgaccttggccaggggtgctaagca

SEQ ID NO: 8661 - RNA, 41 nt, synthetic construct
  source 1..41: mol_type = other RNA
ccaaggttgtaatggatgacgttggccaggggtgctaagca

SEQ ID NO: 8662 - RNA, 45 nt, synthetic construct
  source 1..45: mol_type = other RNA
gtccttccacgattccgaagttgttataaaaagatgaccttggcc

SEQ ID NO: 8663 - RNA, 41 nt, synthetic construct
  source 1..41: mol_type = other RNA
cccaagctgttatggctgacattggccaggggtgctaagca

SEQ ID NO: 8664 - RNA, 40 nt, synthetic construct
  source 1..40: mol_type = other RNA
gtccttccacgtaccaaggctgtcacggatgaccttggcc

SEQ ID NO: 8665 - RNA, 41 nt, synthetic construct
  source 1..41: mol_type = other RNA
caaaagttgtcatatctggccttggccaggggtgctaagca

SEQ ID NO: 8666 - RNA, 42 nt, synthetic construct
  source 1..42: mol_type = other RNA
accaagttgtcgatggctcaccttggccaggggtgctaagca

SEQ ID NO: 8667 - RNA, 41 nt, synthetic construct
  source 1..41: mol_type = other RNA
ctacggctgtcgggttgaaccttggccaggggtgctaagca

SEQ ID NO: 8668 - RNA, 40 nt, synthetic construct
  source 1..40: mol_type = other RNA
gtccttccacatatcaaagctgtcatgaatgaccttggcc

SEQ ID NO: 8669 - RNA, 41 nt, synthetic construct
  source 1..41: mol_type = other RNA
ctaacgctgtcatggggtaccttggccaggggtgctaagca

SEQ ID NO: 8670 - RNA, 41 nt, synthetic construct
  source 1..41: mol_type = other RNA
gtccttccacgatgccaaagctggcatggatgaccttggcc

SEQ ID NO: 8671 - RNA, 41 nt, synthetic construct
  source 1..41: mol_type = other RNA
ccaaagttgttatggctgaccttggccaggggtgctaagca

SEQ ID NO: 8672 - RNA, 42 nt, synthetic construct
  source 1..42: mol_type = other RNA
gtccttccacgatacccaaaattgtcatggctgaccttggcc

SEQ ID NO: 8673 - RNA, 42 nt, synthetic construct
  source 1..42: mol_type = other RNA
gtccttccacgatacccaaaactgtcatggctgaccttggcc

SEQ ID NO: 8674 - RNA, 42 nt, synthetic construct
  source 1..42: mol_type = other RNA
gtccttccacgatacctaaagttgtaatggctgaccttggcc

SEQ ID NO: 8675 - RNA, 43 nt, synthetic construct
  source 1..43: mol_type = other RNA
gtccttccacgattagcaaaagctgtcatggatgaccttggcc

SEQ ID NO: 8676 - RNA, 41 nt, synthetic construct
  source 1..41: mol_type = other RNA
gactgtggtcatgagtccttccacgataccaaagctataat

SEQ ID NO: 8677 - RNA, 41 nt, synthetic construct
  source 1..41: mol_type = other RNA
ccaaacttgacatggatgaccttggccaggggtgctaagca

SEQ ID NO: 8678 - RNA, 41 nt, synthetic construct
  source 1..41: mol_type = other RNA
ccaaacctgacatggatgaccttggccaggggtgctaagca

SEQ ID NO: 8679 - RNA, 41 nt, synthetic construct
  source 1..41: mol_type = other RNA
gactgtggtcatgagtccttacacgctcccaaacctgacat

SEQ ID NO: 8680 - RNA, 40 nt, synthetic construct
  source 1..40: mol_type = other RNA
ctaaagatgtcatggatgacttggccaggggtgctaagca

SEQ ID NO: 8681 - RNA, 40 nt, synthetic construct
  source 1..40: mol_type = other RNA
ccacgtcgtactggatgagcttggccaggggtgctaagca

SEQ ID NO: 8682 - RNA, 41 nt, synthetic construct
  source 1..41: mol_type = other RNA
ctaaagttgtcctggattaccttggccaggggtgctaagca

SEQ ID NO: 8683 - RNA, 41 nt, synthetic construct
  source 1..41: mol_type = other RNA
gtccttccacgatatccaagttgtcatcgatgaccttggcc

SEQ ID NO: 8684 - RNA, 41 nt, synthetic construct
  source 1..41: mol_type = other RNA
cccaagttgtaatgaatgaccttggccaggggtgctaagca

SEQ ID NO: 8685 - RNA, 41 nt, synthetic construct
  source 1..41: mol_type = other RNA
ccaaagctgtcatggatgcccttggccaggggtgctaagca

SEQ ID NO: 8686 - RNA, 41 nt, synthetic construct
  source 1..41: mol_type = other RNA
ccaaaactgtcctgtatgcccttggccaggggtgctaagca

SEQ ID NO: 8687 - RNA, 41 nt, synthetic construct
  source 1..41: mol_type = other RNA
acagagctatcatggctgcccttggccaggggtgctaagca

SEQ ID NO: 8688 - RNA, 45 nt, synthetic construct
  source 1..45: mol_type = other RNA
ccgaagttgttataaaaagatgaccttggccaggggtgctaagca

SEQ ID NO: 8689 - RNA, 41 nt, synthetic construct
  source 1..41: mol_type = other RNA
ctaatgctgtcaggaatgacattggccaggggtgctaagca

SEQ ID NO: 8690 - RNA, 44 nt, synthetic construct
  source 1..44: mol_type = other RNA
ccggagctgtcattgacgagccacttggccaggggtgctaagca

SEQ ID NO: 8691 - RNA, 41 nt, synthetic construct
  source 1..41: mol_type = other RNA
caaaagctgtcatgggtgcgcttggccaggggtgctaagca

SEQ ID NO: 8692 - RNA, 41 nt, synthetic construct
  source 1..41: mol_type = other RNA
tcatagctgtcatagctgaccttggccaggggtgctaagca

SEQ ID NO: 8693 - RNA, 41 nt, synthetic construct
  source 1..41: mol_type = other RNA
ccaaaactgccatggatgacgttggccaggggtgctaagca

SEQ ID NO: 8694 - RNA, 41 nt, synthetic construct
  source 1..41: mol_type = other RNA
cgaaagctgtcatggatgacattggccaggggtgctaagca

SEQ ID NO: 8695 - RNA, 41 nt, synthetic construct
  source 1..41: mol_type = other RNA
taacagctgtcatgaatgagcttggccaggggtgctaagca

SEQ ID NO: 8696 - RNA, 50 nt, synthetic construct
  source 1..50: mol_type = other RNA
tgaaagctttcatgggctgtgactatgagattggccaggggtgctaagca

SEQ ID NO: 8697 - RNA, 40 nt, synthetic construct
  source 1..40: mol_type = other RNA
ccaaagtggtcatgaattagttggccaggggtgctaagca

SEQ ID NO: 8698 - RNA, 40 nt, synthetic construct
  source 1..40: mol_type = other RNA
gtccttccacgtcccaaagtcgtcatggatgaccttggcc

SEQ ID NO: 8699 - RNA, 41 nt, synthetic construct
  source 1..41: mol_type = other RNA
ccggagctgtaatggatgaccttggccaggggtgctaagca

SEQ ID NO: 8700 - RNA, 41 nt, synthetic construct
  source 1..41: mol_type = other RNA
ccaaaactgtcttgggcgaccttggccaggggtgctaagca

SEQ ID NO: 8701 - RNA, 40 nt, synthetic construct
  source 1..40: mol_type = other RNA
gtccttccacgataccaaagcagtcatggtgaccttggcc

SEQ ID NO: 8702 - RNA, 42 nt, synthetic construct
  source 1..42: mol_type = other RNA
ccaacactgtcatgcgatgaccttggccaggggtgctaagca

SEQ ID NO: 8703 - RNA, 41 nt, synthetic construct
  source 1..41: mol_type = other RNA
ttaaagttgtcagggataaccttggccaggggtgctaagca

SEQ ID NO: 8704 - RNA, 41 nt, synthetic construct
  source 1..41: mol_type = other RNA
ccccagttgtcatgggtgaccttggccaggggtgctaagca

SEQ ID NO: 8705 - RNA, 39 nt, synthetic construct
  source 1..39: mol_type = other RNA
gactgtggtcatgagtccttgcacgataccatagttgat

SEQ ID NO: 8706 - RNA, 40 nt, synthetic construct
  source 1..40: mol_type = other RNA
ccacgccgtactggatgagcttggccaggggtgctaagca

SEQ ID NO: 8707 - RNA, 40 nt, synthetic construct
  source 1..40: mol_type = other RNA
gactgtggtcatgagtccttcgtcgataccacgtcgtact

SEQ ID NO: 8708 - RNA, 41 nt, synthetic construct
  source 1..41: mol_type = other RNA
caagagctgtcctggatgaccttggccaggggtgctaagca

SEQ ID NO: 8709 - RNA, 41 nt, synthetic construct
  source 1..41: mol_type = other RNA
caagagttgtcctggatgaccttggccaggggtgctaagca

SEQ ID NO: 8710 - RNA, 40 nt, synthetic construct
  source 1..40: mol_type = other RNA
ccaaagctgtcgtgatggctttggccaggggtgctaagca

SEQ ID NO: 8711 - RNA, 41 nt, synthetic construct
  source 1..41: mol_type = other RNA
cgaaagctgtcacggatgaccttggccaggggtgctaagca

SEQ ID NO: 8712 - RNA, 41 nt, synthetic construct
  source 1..41: mol_type = other RNA
ccaagattgtcatggatacccttggccaggggtgctaagca

SEQ ID NO: 8713 - RNA, 41 nt, synthetic construct
  source 1..41: mol_type = other RNA
gactgtggtcatgagtccttccagaatacaaaaatcgtcat

SEQ ID NO: 8714 - RNA, 41 nt, synthetic construct
  source 1..41: mol_type = other RNA
gactgtggtcatgagtccttctacgttaccaaaactgacat

SEQ ID NO: 8715 - RNA, 41 nt, synthetic construct
  source 1..41: mol_type = other RNA
acagagctatcattgctgaccttggccaggggtgctaagca

SEQ ID NO: 8716 - RNA, 41 nt, synthetic construct
  source 1..41: mol_type = other RNA
gtccttccacgatacccaagcggtcatggatgaccttggcc

SEQ ID NO: 8717 - RNA, 39 nt, synthetic construct
  source 1..39: mol_type = other RNA
tcaaagctgtcatggatgcttggccaggggtgctaagca

SEQ ID NO: 8718 - RNA, 41 nt, synthetic construct
  source 1..41: mol_type = other RNA
ctaaagctgtcatcgatggccttggccaggggtgctaagca

SEQ ID NO: 8719 - RNA, 34 nt, synthetic construct
  source 1..34: mol_type = other RNA
gactgtggtcatgagtccttccgaaacttgtcat

SEQ ID NO: 8720 - RNA, 41 nt, synthetic construct
  source 1..41: mol_type = other RNA
taaaagctgtgatggatgcgcttggccaggggtgctaagca

SEQ ID NO: 8721 - RNA, 41 nt, synthetic construct
  source 1..41: mol_type = other RNA
ccaaggctgtcgtggatgaccttggccaggggtgctaagca

SEQ ID NO: 8722 - RNA, 41 nt, synthetic construct
  source 1..41: mol_type = other RNA
ttaaagctgtcagggataaccttggccaggggtgctaagca

SEQ ID NO: 8723 - RNA, 39 nt, synthetic construct
  source 1..39: mol_type = other RNA
gtccttccacgataccatagttggtggatgaccttggcc

SEQ ID NO: 8724 - RNA, 40 nt, synthetic construct
  source 1..40: mol_type = other RNA
gtccttccacgtcccaaagatgtcatggatgaccttggcc

SEQ ID NO: 8725 - RNA, 42 nt, synthetic construct
  source 1..42: mol_type = other RNA
ccgaggctgttcgtggatggccttggccaggggtgctaagca

SEQ ID NO: 8726 - RNA, 41 nt, synthetic construct
  source 1..41: mol_type = other RNA
gtccttccacgatcccaaaactgtcctgtatgaccttggcc

SEQ ID NO: 8727 - RNA, 41 nt, synthetic construct
  source 1..41: mol_type = other RNA
ctaatgttgcaatggacgaccttggccaggggtgctaagca

SEQ ID NO: 8728 - RNA, 41 nt, synthetic construct
  source 1..41: mol_type = other RNA
gtccttccacgttaccaaaactgacataactgaccttggcc

SEQ ID NO: 8729 - RNA, 41 nt, synthetic construct
  source 1..41: mol_type = other RNA
ccgaagctgtaatagacgactttggccaggggtgctaagca

SEQ ID NO: 8730 - RNA, 41 nt, synthetic construct
  source 1..41: mol_type = other RNA
ccaaaaatgccatggatgacgttggccaggggtgctaagca

SEQ ID NO: 8731 - RNA, 42 nt, synthetic construct
  source 1..42: mol_type = other RNA
gtccttccacgacgaccaagttgtcgatggctgaccttggcc

SEQ ID NO: 8732 - RNA, 34 nt, synthetic construct
  source 1..34: mol_type = other RNA
gactgtggtcatgagtccttccgaaacctgtcat

SEQ ID NO: 8733 - RNA, 41 nt, synthetic construct
  source 1..41: mol_type = other RNA
ccggagctgttataacccactttggccaggggtgctaagca

SEQ ID NO: 8734 - RNA, 41 nt, synthetic construct
  source 1..41: mol_type = other RNA
caaaagctgtcatatctggccttggccaggggtgctaagca

SEQ ID NO: 8735 - RNA, 42 nt, synthetic construct
  source 1..42: mol_type = other RNA
cctaaagttgtaatggctgacgttggccaggggtgctaagca

SEQ ID NO: 8736 - RNA, 42 nt, synthetic construct
  source 1..42: mol_type = other RNA
cctaaagctgtaatggctgacgttggccaggggtgctaagca

SEQ ID NO: 8737 - RNA, 40 nt, synthetic construct
  source 1..40: mol_type = other RNA
ccaaagcggtcatgaattagttggccaggggtgctaagca

SEQ ID NO: 8738 - RNA, 45 nt, synthetic construct
  source 1..45: mol_type = other RNA
gactgtggtcatgagtccttccacgaaaccaaaagagtttgtcat

SEQ ID NO: 8739 - RNA, 41 nt, synthetic construct
  source 1..41: mol_type = other RNA
ccaaggttgttatggatgaccttggccaggggtgctaagca

SEQ ID NO: 8740 - RNA, 41 nt, synthetic construct
  source 1..41: mol_type = other RNA
gtccttccacgattacaagattgtcgtggatgaccttggcc

SEQ ID NO: 8741 - RNA, 41 nt, synthetic construct
  source 1..41: mol_type = other RNA
ccaaatttgtcatggatgaccttggccaggggtgctaagca

SEQ ID NO: 8742 - RNA, 41 nt, synthetic construct
  source 1..41: mol_type = other RNA
caaacgttgtcatggatgcccttggccaggggtgctaagca

SEQ ID NO: 8743 - RNA, 41 nt, synthetic construct
  source 1..41: mol_type = other RNA
gactgtggtcatgagtccttacacgctcccaaacttgacat

SEQ ID NO: 8744 - RNA, 41 nt, synthetic construct
  source 1..41: mol_type = other RNA
gtccttccacgctcccaaacttgacatggatgaccttggcc

SEQ ID NO: 8745 - RNA, 41 nt, synthetic construct
  source 1..41: mol_type = other RNA
tcaaagttgttttggctgaccttggccaggggtgctaagca

SEQ ID NO: 8746 - RNA, 42 nt, synthetic construct
  source 1..42: mol_type = other RNA
gtccttccacaactatcaaagttgttttggctgaccttggcc

SEQ ID NO: 8747 - RNA, 42 nt, synthetic construct
  source 1..42: mol_type = other RNA
gtccttccacgatgccaaagttgttcgcggttgaccttggcc

SEQ ID NO: 8748 - RNA, 40 nt, synthetic construct
  source 1..40: mol_type = other RNA
gactgtggtcatgagtccttcgtcgataccacgccgtact

SEQ ID NO: 8749 - RNA, 40 nt, synthetic construct
  source 1..40: mol_type = other RNA
gtccttccacgataccacgtcgtactggatgaccttggcc

SEQ ID NO: 8750 - RNA, 41 nt, synthetic construct
  source 1..41: mol_type = other RNA
gactgtggtcatgagtccttccacgatctccgagctgaaac

SEQ ID NO: 8751 - RNA, 41 nt, synthetic construct
  source 1..41: mol_type = other RNA
tccgagttgaaaccgatgaccttggccaggggtgctaagca

SEQ ID NO: 8752 - RNA, 41 nt, synthetic construct
  source 1..41: mol_type = other RNA
gtccttccacgatctccgagttgaaaccgatgaccttggcc

SEQ ID NO: 8753 - RNA, 41 nt, synthetic construct
  source 1..41: mol_type = other RNA
gtccttccacgataccaagactgtcatggatgaccttggcc

SEQ ID NO: 8754 - RNA, 40 nt, synthetic construct
  source 1..40: mol_type = other RNA
tacaagtttcatggatggagttggccaggggtgctaagca

SEQ ID NO: 8755 - RNA, 40 nt, synthetic construct
  source 1..40: mol_type = other RNA
gtccttccacgatctacaagcttcatggatgaccttggcc

SEQ ID NO: 8756 - RNA, 41 nt, synthetic construct
  source 1..41: mol_type = other RNA
aaacttgtcatggatagaacgttggccaggggtgctaagca

SEQ ID NO: 8757 - RNA, 41 nt, synthetic construct
  source 1..41: mol_type = other RNA
gactgtggtcatgagtccttccacgatcccaaagcggtcat

SEQ ID NO: 8758 - RNA, 41 nt, synthetic construct
  source 1..41: mol_type = other RNA
gtccttccacgatcccaaagcggtcatgaatgaccttggcc

SEQ ID NO: 8759 - RNA, 45 nt, synthetic construct
  source 1..45: mol_type = other RNA
gtccttccacgaaaccaaaagagtctgtcatggatgaccttggcc

SEQ ID NO: 8760 - RNA, 41 nt, synthetic construct
  source 1..41: mol_type = other RNA
ccaaggctgtcatggatgaccttggccaggggtgctaagca

SEQ ID NO: 8761 - RNA, 40 nt, synthetic construct
  source 1..40: mol_type = other RNA
gtccttccacgtcccaaagccgtcatggatgaccttggcc

SEQ ID NO: 8762 - RNA, 41 nt, synthetic construct
  source 1..41: mol_type = other RNA
ctaaagctgtcatagatggccttggccaggggtgctaagca

SEQ ID NO: 8763 - RNA, 41 nt, synthetic construct
  source 1..41: mol_type = other RNA
gtccttccacgattacaagactgtcgtggatgaccttggcc

SEQ ID NO: 8764 - RNA, 42 nt, synthetic construct
  source 1..42: mol_type = other RNA
gtccttccacactaccaacactgtcatgcgatgaccttggcc

SEQ ID NO: 8765 - RNA, 41 nt, synthetic construct
  source 1..41: mol_type = other RNA
ctaaagctgtcgtggatgaccttggccaggggtgctaagca

SEQ ID NO: 8766 - RNA, 38 nt, synthetic construct
  source 1..38: mol_type = other RNA
gtccttccacgatagagcagtcatggacgaccttggcc

SEQ ID NO: 8767 - RNA, 41 nt, synthetic construct
  source 1..41: mol_type = other RNA
caagagttgttatggatgaccttggccaggggtgctaagca

SEQ ID NO: 8768 - RNA, 41 nt, synthetic construct
  source 1..41: mol_type = other RNA
acttagttatcatggctgaccttggccaggggtgctaagca

SEQ ID NO: 8769 - RNA, 41 nt, synthetic construct
  source 1..41: mol_type = other RNA
gactgtggtcatgagtcctttcacgataccaaggttgtaat

SEQ ID NO: 8770 - RNA, 42 nt, synthetic construct
  source 1..42: mol_type = other RNA
gtccttccacggtaccgaaactgttcgtcgatgaccttggcc

SEQ ID NO: 8771 - RNA, 41 nt, synthetic construct
  source 1..41: mol_type = other RNA
gtccttccacaatacaaaaatcgtcatagacgaccttggcc

SEQ ID NO: 8772 - RNA, 41 nt, synthetic construct
  source 1..41: mol_type = other RNA
ctaacgttgtcatgaatgaccttggccaggggtgctaagca

SEQ ID NO: 8773 - RNA, 40 nt, synthetic construct
  source 1..40: mol_type = other RNA
gtccttccacgatctacaagtttcatggatgaccttggcc

SEQ ID NO: 8774 - RNA, 35 nt, synthetic construct
  source 1..35: mol_type = other RNA
gtccttccacaaacttgtcatggatgaccttggcc

SEQ ID NO: 8775 - RNA, 35 nt, synthetic construct
  source 1..35: mol_type = other RNA
gtccttccacaaacctgtcatggatgaccttggcc

SEQ ID NO: 8776 - RNA, 40 nt, synthetic construct
  source 1..40: mol_type = other RNA
gtccttccacgataccaacctgtcatggatgaccttggcc

SEQ ID NO: 8777 - RNA, 45 nt, synthetic construct
  source 1..45: mol_type = other RNA
ccaaaagagtctgtcatggatggccttggccaggggtgctaagca

SEQ ID NO: 8778 - RNA, 41 nt, synthetic construct
  source 1..41: mol_type = other RNA
ccaaagttataatggctgaccttggccaggggtgctaagca

SEQ ID NO: 8779 - RNA, 40 nt, synthetic construct
  source 1..40: mol_type = other RNA
gtccttccacgataccacgccgtactggatgaccttggcc

SEQ ID NO: 8780 - RNA, 41 nt, synthetic construct
  source 1..41: mol_type = other RNA
ccagggttatcatggctgaccttggccaggggtgctaagca

SEQ ID NO: 8781 - RNA, 41 nt, synthetic construct
  source 1..41: mol_type = other RNA
gtccttccacaatacaaaaaccgtcatagacgaccttggcc

SEQ ID NO: 8782 - RNA, 41 nt, synthetic construct
  source 1..41: mol_type = other RNA
ctaacgctgtcatgaatgaccttggccaggggtgctaagca

SEQ ID NO: 8783 - RNA, 41 nt, synthetic construct
  source 1..41: mol_type = other RNA
cccaagcggtcatggatacccttggccaggggtgctaagca

SEQ ID NO: 8784 - RNA, 38 nt, synthetic construct
  source 1..38: mol_type = other RNA
gagcagtcatggacgaccttggccaggggtgctaagca

SEQ ID NO: 8785 - RNA, 41 nt, synthetic construct
  source 1..41: mol_type = other RNA
caagagctgttatggatgaccttggccaggggtgctaagca

SEQ ID NO: 8786 - RNA, 42 nt, synthetic construct
  source 1..42: mol_type = other RNA
ccaaagctgttcgcggttgaccttggccaggggtgctaagca

SEQ ID NO: 8787 - RNA, 41 nt, synthetic construct
  source 1..41: mol_type = other RNA
ccccagctgtcatagatgaccttggccaggggtgctaagca

SEQ ID NO: 8788 - RNA, 45 nt, synthetic construct
  source 1..45: mol_type = other RNA
gtccttccacgaaaccaaaagagtttgtcatggatgaccttggcc

SEQ ID NO: 8789 - RNA, 41 nt, synthetic construct
  source 1..41: mol_type = other RNA
gactgtggtcatgagtccttccacgataccaaaaccgtcgt

SEQ ID NO: 8790 - RNA, 41 nt, synthetic construct
  source 1..41: mol_type = other RNA
ggactgtggtaatgagtcctcgcacaataccaaagttgtca

SEQ ID NO: 8791 - RNA, 41 nt, synthetic construct
  source 1..41: mol_type = other RNA
ggactgtggtcttgagtactcgcacggtaacaaagttgtca

SEQ ID NO: 8792 - RNA, 41 nt, synthetic construct
  source 1..41: mol_type = other RNA
ggactgtggtcatgagtcctcgcacgttaccaaagttgtca

SEQ ID NO: 8793 - RNA, 42 nt, synthetic construct
  source 1..42: mol_type = other RNA
ggactgtggtcatagagaactcgcacgctacgaaagttgtca

SEQ ID NO: 8794 - RNA, 41 nt, synthetic construct
  source 1..41: mol_type = other RNA
ggactgtggtcgtgagtccttccacaataccaaagttgtca

SEQ ID NO: 8795 - RNA, 41 nt, synthetic construct
  source 1..41: mol_type = other RNA
ggactgtggtcttgagtacttgcacggtaacaaagttgtca

SEQ ID NO: 8796 - RNA, 42 nt, synthetic construct
  source 1..42: mol_type = other RNA
ggcagtgatggcatggactgtggtcatagagaactcgcacgc

SEQ ID NO: 8797 - RNA, 41 nt, synthetic construct
  source 1..41: mol_type = other RNA
ggactgtggtcatgagtccttgcacgttaccaaagttgtca

SEQ ID NO: 8798 - RNA, 42 nt, synthetic construct
  source 1..42: mol_type = other RNA
ggactgtggtcatagagaacttgcacgctacgaaagttgtca

SEQ ID NO: 8799 - RNA, 41 nt, synthetic construct
  source 1..41: mol_type = other RNA
ggcagtgatggcatggactgtgatcttgagtactcgcacgg

SEQ ID NO: 8800 - RNA, 41 nt, synthetic construct
  source 1..41: mol_type = other RNA
ggcagtgatggcatggactgtggtcatgagtccttccagga

SEQ ID NO: 8801 - RNA, 40 nt, synthetic construct
  source 1..40: mol_type = other RNA
ggactgtggtcaagagccctcgcacattacaaagttgtca

SEQ ID NO: 8802 - RNA, 41 nt, synthetic construct
  source 1..41: mol_type = other RNA
ggcagtgatggcatggactgttgtaatgagtcctcgcacaa

SEQ ID NO: 8803 - RNA, 41 nt, synthetic construct
  source 1..41: mol_type = other RNA
ggactgtggtaatgagtccttgcacaataccaaagttgtca

SEQ ID NO: 8804 - RNA, 41 nt, synthetic construct
  source 1..41: mol_type = other RNA
ggactgtggtcatgagtcctcacacgataccaaagttgtca

SEQ ID NO: 8805 - RNA, 40 nt, synthetic construct
  source 1..40: mol_type = other RNA
agccctcgcacattacaaagttgtcatggatgaccttggc

SEQ ID NO: 8806 - RNA, 40 nt, synthetic construct
  source 1..40: mol_type = other RNA
ggcagtgatggcatggactgtgatttgagtccccccacga

SEQ ID NO: 8807 - RNA, 41 nt, synthetic construct
  source 1..41: mol_type = other RNA
ggcagtgatggcatggactgtgcgaatgagtccttccacga

SEQ ID NO: 8808 - RNA, 41 nt, synthetic construct
  source 1..41: mol_type = other RNA
ggcagtgatggcatggactgtggtcaagagcccttgcacat

SEQ ID NO: 8809 - RNA, 41 nt, synthetic construct
  source 1..41: mol_type = other RNA
ggcagtgatggcatggactgtgaccatgagccctcccacga

SEQ ID NO: 8810 - RNA, 41 nt, synthetic construct
  source 1..41: mol_type = other RNA
ggcagtgatggcatggactgtggtcaagagccctcgcacat

SEQ ID NO: 8811 - RNA, 41 nt, synthetic construct
  source 1..41: mol_type = other RNA
ggactgtggtcatgagtcttcccacggtgccaaagttgtca

SEQ ID NO: 8812 - RNA, 41 nt, synthetic construct
  source 1..41: mol_type = other RNA
ggcagtgatggcatggactgtggccatgaggccccccacga

SEQ ID NO: 8813 - RNA, 41 nt, synthetic construct
  source 1..41: mol_type = other RNA
ggactgtggtcatgagtactcccaaggtaacaaagttgtca

SEQ ID NO: 8814 - RNA, 41 nt, synthetic construct
  source 1..41: mol_type = other RNA
ggcagtgatggcatggactgtggccatgagtcctcccacga

SEQ ID NO: 8815 - RNA, 41 nt, synthetic construct
  source 1..41: mol_type = other RNA
ggcagtgatggcatggactgtggtaatgagtcctcccacac

SEQ ID NO: 8816 - RNA, 41 nt, synthetic construct
  source 1..41: mol_type = other RNA
ggactgtggttatgagtcccccgacgttagcaaagttgtca

SEQ ID NO: 8817 - RNA, 41 nt, synthetic construct
  source 1..41: mol_type = other RNA
ggactgtggtgatgagtccttccacaataccaaagttgtca

SEQ ID NO: 8818 - RNA, 41 nt, synthetic construct
  source 1..41: mol_type = other RNA
ggcagtgatggcatggactgtcctaatgagtccccccacga

SEQ ID NO: 8819 - RNA, 41 nt, synthetic construct
  source 1..41: mol_type = other RNA
agtctttccacggtgccaaagttgtcatggatgaccttggc

SEQ ID NO: 8820 - RNA, 41 nt, synthetic construct
  source 1..41: mol_type = other RNA
ggcagtgatggcatggactgtggtcatgagtccttccacaa

SEQ ID NO: 8821 - RNA, 41 nt, synthetic construct
  source 1..41: mol_type = other RNA
ggcagtgatggcatggactgtggtgatgagtccttccacga

SEQ ID NO: 8822 - RNA, 41 nt, synthetic construct
  source 1..41: mol_type = other RNA
ggactgtggtcgtgagtcctcgcccgatgccaaagttgtca

SEQ ID NO: 8823 - RNA, 40 nt, synthetic construct
  source 1..40: mol_type = other RNA
ggcagtgatggcatggactgtgatcatagtcgtctcacga

SEQ ID NO: 8824 - RNA, 41 nt, synthetic construct
  source 1..41: mol_type = other RNA
ggcagtgatggcatggactgtgaccataagtccccccacga

SEQ ID NO: 8825 - RNA, 41 nt, synthetic construct
  source 1..41: mol_type = other RNA
ggcagtgatggcatggactgttttcatgagtcctcgcacgt

SEQ ID NO: 8826 - RNA, 41 nt, synthetic construct
  source 1..41: mol_type = other RNA
ggcagtgatggcatggactgtagtcatgagtccttccacgc

SEQ ID NO: 8827 - RNA, 41 nt, synthetic construct
  source 1..41: mol_type = other RNA
ggcagtgatggcatggactgtgcaaatgagtccttccacgc

SEQ ID NO: 8828 - RNA, 41 nt, synthetic construct
  source 1..41: mol_type = other RNA
ggcagtgatggcatggactgtgatcttgagtacttgcacgg

SEQ ID NO: 8829 - RNA, 41 nt, synthetic construct
  source 1..41: mol_type = other RNA
ggcagtgatggcatggactgtggtcatgagtactcccccgt

SEQ ID NO: 8830 - RNA, 41 nt, synthetic construct
  source 1..41: mol_type = other RNA
ggcagtgatggcatggactgtggtcatgagtacttccacga

SEQ ID NO: 8831 - RNA, 40 nt, synthetic construct
  source 1..40: mol_type = other RNA
ggcagtgatggcatggactgtggtcatgactcttccaccc

SEQ ID NO: 8832 - RNA, 41 nt, synthetic construct
  source 1..41: mol_type = other RNA
ggactgtggtcacgagtccttgcccgctaccaaagttgtca

SEQ ID NO: 8833 - RNA, 41 nt, synthetic construct
  source 1..41: mol_type = other RNA
agtccttccacgatatcaaagttgtcatggatgaccttggc

SEQ ID NO: 8834 - RNA, 41 nt, synthetic construct
  source 1..41: mol_type = other RNA
ggcagtgatggcatggactgtggtcatgagtcctcacacga

SEQ ID NO: 8835 - RNA, 41 nt, synthetic construct
  source 1..41: mol_type = other RNA
ggcagtgatggcatggactgtggcaatgaggcctcccacgg

SEQ ID NO: 8836 - RNA, 41 nt, synthetic construct
  source 1..41: mol_type = other RNA
ggactgtggtcatgagtcctcccacgatactaaagttgtca

SEQ ID NO: 8837 - RNA, 41 nt, synthetic construct
  source 1..41: mol_type = other RNA
ggactgtggtcgtgagtccttgcccgatgccaaagttgtca

SEQ ID NO: 8838 - RNA, 41 nt, synthetic construct
  source 1..41: mol_type = other RNA
ggactgtggtcatgaatctttccacgatgccaaagttgtca

SEQ ID NO: 8839 - RNA, 40 nt, synthetic construct
  source 1..40: mol_type = other RNA
ggactgtggtcaagagcccttgcacattacaaagttgtca

SEQ ID NO: 8840 - RNA, 41 nt, synthetic construct
  source 1..41: mol_type = other RNA
ggcagtgatggcatggactgtggtgatcagccccccctcga

SEQ ID NO: 8841 - RNA, 41 nt, synthetic construct
  source 1..41: mol_type = other RNA
ggactgtggtcatgagtacttccaaggtaacaaagttgtca

SEQ ID NO: 8842 - RNA, 41 nt, synthetic construct
  source 1..41: mol_type = other RNA
ggactgtggtaatgagtccccccacgataacaaagttgtca

SEQ ID NO: 8843 - RNA, 41 nt, synthetic construct
  source 1..41: mol_type = other RNA
agtcctcccacgataccacagttgtcatggatgaccttggc

SEQ ID NO: 8844 - RNA, 41 nt, synthetic construct
  source 1..41: mol_type = other RNA
ggcagtgatggcatggactgtggtcatgagtcatcccacgt

SEQ ID NO: 8845 - RNA, 41 nt, synthetic construct
  source 1..41: mol_type = other RNA
ggactgtggtcatgagtactcccacgataccaaagttgtca

SEQ ID NO: 8846 - RNA, 41 nt, synthetic construct
  source 1..41: mol_type = other RNA
ggcagtgatggcatggactgtggtcacgagtccttgcccgc

SEQ ID NO: 8847 - RNA, 41 nt, synthetic construct
  source 1..41: mol_type = other RNA
ggactgtggtcatgaggccccccacgataacaaagttgtca

SEQ ID NO: 8848 - RNA, 41 nt, synthetic construct
  source 1..41: mol_type = other RNA
ggcagtgatggcatggactgtggcaatgaggccttccacgg

SEQ ID NO: 8849 - RNA, 40 nt, synthetic construct
  source 1..40: mol_type = other RNA
ggcagtgatggcatggactgtggtcatgagcctcccacgg

SEQ ID NO: 8850 - RNA, 41 nt, synthetic construct
  source 1..41: mol_type = other RNA
ggactgtggtcatgagtccttccacgatacaaaagttgtca

SEQ ID NO: 8851 - RNA, 41 nt, synthetic construct
  source 1..41: mol_type = other RNA
ggcagtgatggcatggactgtggctatgagtccttccacgg

SEQ ID NO: 8852 - RNA, 41 nt, synthetic construct
  source 1..41: mol_type = other RNA
ggcagtgatggcatggactgtggccatgagtcctcccccgt

SEQ ID NO: 8853 - RNA, 41 nt, synthetic construct
  source 1..41: mol_type = other RNA
ggactgtggtcataagtccccccacgataacaaagttgtca

SEQ ID NO: 8854 - RNA, 41 nt, synthetic construct
  source 1..41: mol_type = other RNA
ggactgtggtcatgagtcctcccacgaaaccaaagttgtca

SEQ ID NO: 8855 - RNA, 41 nt, synthetic construct
  source 1..41: mol_type = other RNA
ggcagtgatggcatggactgtgcccatcagtccctccacgg

SEQ ID NO: 8856 - RNA, 41 nt, synthetic construct
  source 1..41: mol_type = other RNA
ggcagtgatggcatggactgtccatcacagtccccccacga

SEQ ID NO: 8857 - RNA, 41 nt, synthetic construct
  source 1..41: mol_type = other RNA
ggcagtgatggcatggactggggtcataagtcctcccacgg

SEQ ID NO: 8858 - RNA, 41 nt, synthetic construct
  source 1..41: mol_type = other RNA
ggactgtggtcatgagtgcttgcccgaacccaaagttgtca

SEQ ID NO: 8859 - RNA, 41 nt, synthetic construct
  source 1..41: mol_type = other RNA
ggtccttccacgataccagagttgtcatggatgaccttggc

SEQ ID NO: 8860 - RNA, 41 nt, synthetic construct
  source 1..41: mol_type = other RNA
ggactgtggtcatgggtcctcccacgataccaaagttgtca

SEQ ID NO: 8861 - RNA, 41 nt, synthetic construct
  source 1..41: mol_type = other RNA
ggcagtgatggcatggactgtggtcatgagtgcccccacga

SEQ ID NO: 8862 - RNA, 41 nt, synthetic construct
  source 1..41: mol_type = other RNA
ggactgtggtcatgagtcctcccgggataccaaagttgtca

SEQ ID NO: 8863 - RNA, 41 nt, synthetic construct
  source 1..41: mol_type = other RNA
ggcagtgatggcatggactgtgcgaatgagtcctcccacga

SEQ ID NO: 8864 - RNA, 41 nt, synthetic construct
  source 1..41: mol_type = other RNA
ggactgtggtcatgagtcctcacatgatactaaagttgtca

SEQ ID NO: 8865 - RNA, 42 nt, synthetic construct
  source 1..42: mol_type = other RNA
ggcagtgatggcatggactgtggtcgtgagacctcaacccga

SEQ ID NO: 8866 - RNA, 42 nt, synthetic construct
  source 1..42: mol_type = other RNA
ggcagtgatggcatggactgtggtcgtgagaccttaacccga

SEQ ID NO: 8867 - RNA, 41 nt, synthetic construct
  source 1..41: mol_type = other RNA
ggcagtgatggcatggactgtggtcaagcgtcctccctcgt

SEQ ID NO: 8868 - RNA, 41 nt, synthetic construct
  source 1..41: mol_type = other RNA
ggcagtgatggcatggactgttgtaatgagtccttgcacaa

SEQ ID NO: 8869 - RNA, 41 nt, synthetic construct
  source 1..41: mol_type = other RNA
ggactgtggtcgtgagtcctcccgcgatatcaaagttgtca

SEQ ID NO: 8870 - RNA, 41 nt, synthetic construct
  source 1..41: mol_type = other RNA
ggactgtggtgatgagtctttccacgataccaaagttgtca

SEQ ID NO: 8871 - RNA, 41 nt, synthetic construct
  source 1..41: mol_type = other RNA
ggcagtgatggcatggactgtggtcataagtccttgccaga

SEQ ID NO: 8872 - RNA, 41 nt, synthetic construct
  source 1..41: mol_type = other RNA
ggactgtggtaatgaggccttccacggtaccaaagttgtca

SEQ ID NO: 8873 - RNA, 42 nt, synthetic construct
  source 1..42: mol_type = other RNA
ggactgtggttataagtactccccagatatctaaagttgtca

SEQ ID NO: 8874 - RNA, 41 nt, synthetic construct
  source 1..41: mol_type = other RNA
ggactgtggttatgagtcttcccacggtgccaaagttgtca

SEQ ID NO: 8875 - RNA, 41 nt, synthetic construct
  source 1..41: mol_type = other RNA
ggactgtggttatgagtcctcccacggtaccaaagttgtca

SEQ ID NO: 8876 - RNA, 40 nt, synthetic construct
  source 1..40: mol_type = other RNA
ggtccatccacgataccaagttgtcatggatgaccttggc

SEQ ID NO: 8877 - RNA, 41 nt, synthetic construct
  source 1..41: mol_type = other RNA
ggcagtgatggcatggactgtggttctgagcccatccacga

SEQ ID NO: 8878 - RNA, 41 nt, synthetic construct
  source 1..41: mol_type = other RNA
ggactgtggtcatgaatcttcccacgatgccaaagttgtca

SEQ ID NO: 8879 - RNA, 41 nt, synthetic construct
  source 1..41: mol_type = other RNA
agtcccccccgattaccaaagttgtcatggatgaccttggc

SEQ ID NO: 8880 - RNA, 41 nt, synthetic construct
  source 1..41: mol_type = other RNA
ggactgtggtcatgagtccctccacgctaacaaagttgtca

SEQ ID NO: 8881 - RNA, 41 nt, synthetic construct
  source 1..41: mol_type = other RNA
ggactgtggtgatcagtacccccacgatgccaaagttgtca

SEQ ID NO: 8882 - RNA, 41 nt, synthetic construct
  source 1..41: mol_type = other RNA
ggcagtgatggcatggactgtggtgatcagcccctcctcga

SEQ ID NO: 8883 - RNA, 41 nt, synthetic construct
  source 1..41: mol_type = other RNA
ggcagtgatggcatggactgtggtcctgagtactcccacga

SEQ ID NO: 8884 - RNA, 41 nt, synthetic construct
  source 1..41: mol_type = other RNA
ggactgtggtaatgagtactcccacactacgaaagttgtca

SEQ ID NO: 8885 - RNA, 41 nt, synthetic construct
  source 1..41: mol_type = other RNA
cgtccccccacgctaacaaaattgtcatggatgaccttggc

SEQ ID NO: 8886 - RNA, 40 nt, synthetic construct
  source 1..40: mol_type = other RNA
ggcagtgatggcatggactgtgatttgagtccctccacga

SEQ ID NO: 8887 - RNA, 41 nt, synthetic construct
  source 1..41: mol_type = other RNA
ggcagtgatggcatggactgtgcaaatgagtcctcccacgc

SEQ ID NO: 8888 - RNA, 41 nt, synthetic construct
  source 1..41: mol_type = other RNA
ggactgtggttatgagtccccccaccgtaacaaagttgtca

SEQ ID NO: 8889 - RNA, 41 nt, synthetic construct
  source 1..41: mol_type = other RNA
ggactgtggtcatgagtactgccgcgataacaaagttgtca

SEQ ID NO: 8890 - RNA, 41 nt, synthetic construct
  source 1..41: mol_type = other RNA
ggactgtggtaatgagcccccccaccataagaaagttgtca

SEQ ID NO: 8891 - RNA, 41 nt, synthetic construct
  source 1..41: mol_type = other RNA
agtcatcccacgttaccaacgttgtcatggatgaccttggc

SEQ ID NO: 8892 - RNA, 41 nt, synthetic construct
  source 1..41: mol_type = other RNA
ggcagtgatggcatggactgtagtcatgagtcctcccacgg

SEQ ID NO: 8893 - RNA, 40 nt, synthetic construct
  source 1..40: mol_type = other RNA
ggcagtgatggcatggactgtggtcatgagcgtcccacgg

SEQ ID NO: 8894 - RNA, 41 nt, synthetic construct
  source 1..41: mol_type = other RNA
ggactgtggtaatgagtcctcccacgatatcaaagttgtca

SEQ ID NO: 8895 - RNA, 41 nt, synthetic construct
  source 1..41: mol_type = other RNA
ggcagtgatggcatggactgtggtcatgagtccttccacgc

SEQ ID NO: 8896 - RNA, 41 nt, synthetic construct
  source 1..41: mol_type = other RNA
ggactgtggtcatgagcccttccacgataccaaagttgtca

SEQ ID NO: 8897 - RNA, 41 nt, synthetic construct
  source 1..41: mol_type = other RNA
agtcctcccacgctatcaaagttgtcatggatgaccttggc

SEQ ID NO: 8898 - RNA, 41 nt, synthetic construct
  source 1..41: mol_type = other RNA
agatcttccaccataccaaggttgtcatggatgaccttggc

SEQ ID NO: 8899 - RNA, 41 nt, synthetic construct
  source 1..41: mol_type = other RNA
ggactgtggtcatgagtcctcccacaataccaaagttgtca

SEQ ID NO: 8900 - RNA, 41 nt, synthetic construct
  source 1..41: mol_type = other RNA
ggactgtggtcatgagtcccaccgcgataccaaagttgtca

SEQ ID NO: 8901 - RNA, 40 nt, synthetic construct
  source 1..40: mol_type = other RNA
agccttccccgctaccaaagttgtcatggatgaccttggc

SEQ ID NO: 8902 - RNA, 40 nt, synthetic construct
  source 1..40: mol_type = other RNA
ggcagtgatggcatggactgtggtcatgagcctcccccgc

SEQ ID NO: 8903 - RNA, 41 nt, synthetic construct
  source 1..41: mol_type = other RNA
ggcagtgatggcatggactgtgttcatgagtcctcccgcga

SEQ ID NO: 8904 - RNA, 41 nt, synthetic construct
  source 1..41: mol_type = other RNA
ggactgtggtaatgaggcctcccacggtaccaaagttgtca

SEQ ID NO: 8905 - RNA, 41 nt, synthetic construct
  source 1..41: mol_type = other RNA
ggcagtgatggcatggactgtggtcataagtactccccaga

SEQ ID NO: 8906 - RNA, 41 nt, synthetic construct
  source 1..41: mol_type = other RNA
ggcagtgatggcatggactgaatgtatgagtccttccacgg

SEQ ID NO: 8907 - RNA, 41 nt, synthetic construct
  source 1..41: mol_type = other RNA
ggcagtgatggcatggactgtggctatgagtcctcccacgg

SEQ ID NO: 8908 - RNA, 41 nt, synthetic construct
  source 1..41: mol_type = other RNA
ggcagtgatggcatggactgtggtcatgagtccctccacac

SEQ ID NO: 8909 - RNA, 38 nt, synthetic construct
  source 1..38: mol_type = other RNA
agtccttccacgataccgttgtcatggatgaccttggc

SEQ ID NO: 8910 - RNA, 41 nt, synthetic construct
  source 1..41: mol_type = other RNA
ggactgtggtcttgagtcctcccacgataccaaagttgtca

SEQ ID NO: 8911 - RNA, 41 nt, synthetic construct
  source 1..41: mol_type = other RNA
agtccttcctcgttaccagagttgtcatggatgaccttggc

SEQ ID NO: 8912 - RNA, 42 nt, synthetic construct
  source 1..42: mol_type = other RNA
ggcagtgatggcatggactgtggtcatagagaacttgcacgc

SEQ ID NO: 8913 - RNA, 41 nt, synthetic construct
  source 1..41: mol_type = other RNA
ggcagtgatggcatggactgtggtcacgagacctcccacga

SEQ ID NO: 8914 - RNA, 40 nt, synthetic construct
  source 1..40: mol_type = other RNA
agccctccctgataccaaagttgtcatggatgaccttggc

SEQ ID NO: 8915 - RNA, 41 nt, synthetic construct
  source 1..41: mol_type = other RNA
agccatcccccgttaccacagttgtcatggatgaccttggc

SEQ ID NO: 8916 - RNA, 41 nt, synthetic construct
  source 1..41: mol_type = other RNA
ggcagtgatggcatggactgtggtcatgagtcctcgcccga

SEQ ID NO: 8917 - RNA, 41 nt, synthetic construct
  source 1..41: mol_type = other RNA
agtccttgcccgatgccaaacttgtcatggatgaccttggc

SEQ ID NO: 8918 - RNA, 41 nt, synthetic construct
  source 1..41: mol_type = other RNA
ggcagtgatggcatggactgtggtcctgagtccatccacga

SEQ ID NO: 8919 - RNA, 41 nt, synthetic construct
  source 1..41: mol_type = other RNA
ggactgtggtcatgagtccctcccgattaccaaagttgtca

SEQ ID NO: 8920 - RNA, 41 nt, synthetic construct
  source 1..41: mol_type = other RNA
ggcagtgatggcatggactgtgatcatgagtccccccacgc

SEQ ID NO: 8921 - RNA, 44 nt, synthetic construct
  source 1..44: mol_type = other RNA
agtccccccacgctaacatccaagttgtcatggatgaccttggc

SEQ ID NO: 8922 - RNA, 40 nt, synthetic construct
  source 1..40: mol_type = other RNA
agcccttgcacattacaaagttgtcatggatgaccttggc

SEQ ID NO: 8923 - RNA, 41 nt, synthetic construct
  source 1..41: mol_type = other RNA
ggcagtgatggcatggactgtggccaggagccctcccacgc

SEQ ID NO: 8924 - RNA, 41 nt, synthetic construct
  source 1..41: mol_type = other RNA
ggcagtgatggcatggactgtggtcatgagcccttccacca

SEQ ID NO: 8925 - RNA, 41 nt, synthetic construct
  source 1..41: mol_type = other RNA
ggactgtggtcatgagccctcccaccataccaaagttgtca

SEQ ID NO: 8926 - RNA, 41 nt, synthetic construct
  source 1..41: mol_type = other RNA
ggactgtggtcctgggtactcccacgataccaaagttgtca

SEQ ID NO: 8927 - RNA, 41 nt, synthetic construct
  source 1..41: mol_type = other RNA
ggcagtgatggcatggactgtgaccataagtccctccacga

SEQ ID NO: 8928 - RNA, 41 nt, synthetic construct
  source 1..41: mol_type = other RNA
ggactgtggtcataagtccctccacgataacaaagttgtca

SEQ ID NO: 8929 - RNA, 41 nt, synthetic construct
  source 1..41: mol_type = other RNA
agtccttccacaataccaaccttgtcatggatgaccttggc

SEQ ID NO: 8930 - RNA, 41 nt, synthetic construct
  source 1..41: mol_type = other RNA
ggcagtgatggcatggactgttttcatgagtccttgcacgt

SEQ ID NO: 8931 - RNA, 40 nt, synthetic construct
  source 1..40: mol_type = other RNA
ggactgtggtttgagtccctccacgataccaaagttgtca

SEQ ID NO: 8932 - RNA, 41 nt, synthetic construct
  source 1..41: mol_type = other RNA
ggactgtggtcatgagtactcccgcgataacaaagttgtca

SEQ ID NO: 8933 - RNA, 41 nt, synthetic construct
  source 1..41: mol_type = other RNA
ggcagtgatggcatggactgtggagatgagtccttccacaa

SEQ ID NO: 8934 - RNA, 41 nt, synthetic construct
  source 1..41: mol_type = other RNA
ggactgtggtgatgagtcctcccacaataccaaagttgtca

SEQ ID NO: 8935 - RNA, 41 nt, synthetic construct
  source 1..41: mol_type = other RNA
ggcagtgatggcatggactgtggacatgagccctctcacga

SEQ ID NO: 8936 - RNA, 41 nt, synthetic construct
  source 1..41: mol_type = other RNA
aacccttccatggtaccaaatttgtcatggatgaccttggc

SEQ ID NO: 8937 - RNA, 41 nt, synthetic construct
  source 1..41: mol_type = other RNA
ggcagtgatggcatggactgtgataatgagcccctccacca

SEQ ID NO: 8938 - RNA, 41 nt, synthetic construct
  source 1..41: mol_type = other RNA
ggcagtgatggcatggactgtgataatgagcccccccacca

SEQ ID NO: 8939 - RNA, 41 nt, synthetic construct
  source 1..41: mol_type = other RNA
ggactgtggtcatgagtgctcccacgaacccaaagttgtca

SEQ ID NO: 8940 - RNA, 41 nt, synthetic construct
  source 1..41: mol_type = other RNA
ggcagtgatggcatggactgtgcatatgagtacccgcactc

SEQ ID NO: 8941 - RNA, 41 nt, synthetic construct
  source 1..41: mol_type = other RNA
agtcttcccacggtatcaatgttgtcatggatgaccttggc

SEQ ID NO: 8942 - RNA, 41 nt, synthetic construct
  source 1..41: mol_type = other RNA
agtgctcccacgaacccaaagttgtcatggatgaccttggc

SEQ ID NO: 8943 - RNA, 41 nt, synthetic construct
  source 1..41: mol_type = other RNA
ggcagtgatggcatggactgtgacaatgcgtccccccacgc

SEQ ID NO: 8944 - RNA, 41 nt, synthetic construct
  source 1..41: mol_type = other RNA
ggactgtggtcatgagtccttccacgataccaaagttgtca

SEQ ID NO: 8945 - RNA, 41 nt, synthetic construct
  source 1..41: mol_type = other RNA
ggcagtgatggcatggactgtggtcatgagtcattccacgt

SEQ ID NO: 8946 - RNA, 41 nt, synthetic construct
  source 1..41: mol_type = other RNA
ggactgtggtcatgagtcatcccacgttaccaaagttgtca

SEQ ID NO: 8947 - RNA, 41 nt, synthetic construct
  source 1..41: mol_type = other RNA
agtcattccacgataccaaagttgtcatggatgaccttggc

SEQ ID NO: 8948 - RNA, 41 nt, synthetic construct
  source 1..41: mol_type = other RNA
agtgcctccacgataccaaagttgtcatggatgaccttggc

SEQ ID NO: 8949 - RNA, 41 nt, synthetic construct
  source 1..41: mol_type = other RNA
agtgcccccacgataccaaagttgtcatggatgaccttggc

SEQ ID NO: 8950 - RNA, 41 nt, synthetic construct
  source 1..41: mol_type = other RNA
ggactgtggtcatgagtgcctccacgataccaaagttgtca

SEQ ID NO: 8951 - RNA, 41 nt, synthetic construct
  source 1..41: mol_type = other RNA
agtcgtcccacggtaccatagttgtcatggatgaccttggc

SEQ ID NO: 8952 - RNA, 41 nt, synthetic construct
  source 1..41: mol_type = other RNA
ggactgtggtcatgagtacttccccgttaccaaagttgtca

SEQ ID NO: 8953 - RNA, 40 nt, synthetic construct
  source 1..40: mol_type = other RNA
ggcagtgatggcatggactgtggtcatgagcgttccacgg

SEQ ID NO: 8954 - RNA, 40 nt, synthetic construct
  source 1..40: mol_type = other RNA
ggactgtggtcatgagcgttccacggtaccaaagttgtca

SEQ ID NO: 8955 - RNA, 41 nt, synthetic construct
  source 1..41: mol_type = other RNA
ggactgtggtcatgagtccttccgggataccaaagttgtca

SEQ ID NO: 8956 - RNA, 41 nt, synthetic construct
  source 1..41: mol_type = other RNA
agtccttccgggataccacaattgtcatggatgaccttggc

SEQ ID NO: 8957 - RNA, 41 nt, synthetic construct
  source 1..41: mol_type = other RNA
agtcctcccgggataccacaattgtcatggatgaccttggc

SEQ ID NO: 8958 - RNA, 41 nt, synthetic construct
  source 1..41: mol_type = other RNA
actcttccaccctacctaaagttgtcatggatgaccttggc

SEQ ID NO: 8959 - RNA, 40 nt, synthetic construct
  source 1..40: mol_type = other RNA
ggactgtggtcatgactcttccaccctaccaaagttgtca

SEQ ID NO: 8960 - RNA, 40 nt, synthetic construct
  source 1..40: mol_type = other RNA
ggactgtggtcatgactctcccaccctaccaaagttgtca

SEQ ID NO: 8961 - RNA, 41 nt, synthetic construct
  source 1..41: mol_type = other RNA
ggcagtgatggcatggactgtggtcacgagtcctcgcccgc

SEQ ID NO: 8962 - RNA, 41 nt, synthetic construct
  source 1..41: mol_type = other RNA
agtcctcacatgatactaaagttgtcatggatgaccttggc

SEQ ID NO: 8963 - RNA, 41 nt, synthetic construct
  source 1..41: mol_type = other RNA
ggcagtgatggcatggactgtggtcatgagtcctcccacac

SEQ ID NO: 8964 - RNA, 41 nt, synthetic construct
  source 1..41: mol_type = other RNA
ggactgtggtcatgagtcctcccacactaccaaagttgtca

SEQ ID NO: 8965 - RNA, 41 nt, synthetic construct
  source 1..41: mol_type = other RNA
ggactgtggtcatgaatcctcccacgatcccaaagttgtca

SEQ ID NO: 8966 - RNA, 41 nt, synthetic construct
  source 1..41: mol_type = other RNA
ggactgtggtcatgaatccttccacgatcccaaagttgtca

SEQ ID NO: 8967 - RNA, 41 nt, synthetic construct
  source 1..41: mol_type = other RNA
aatccttccacgatcccaaaattgtcatggatgaccttggc

SEQ ID NO: 8968 - RNA, 41 nt, synthetic construct
  source 1..41: mol_type = other RNA
ggcagtgatggcatggactgtggtcatgcgtcctcccgcgc

SEQ ID NO: 8969 - RNA, 41 nt, synthetic construct
  source 1..41: mol_type = other RNA
cgtcctcccgcgctaccaaagttgtcatggatgaccttggc

SEQ ID NO: 8970 - RNA, 41 nt, synthetic construct
  source 1..41: mol_type = other RNA
cgtccttccgcgctaccaaagttgtcatggatgaccttggc

SEQ ID NO: 8971 - RNA, 41 nt, synthetic construct
  source 1..41: mol_type = other RNA
ggactgtggtcatgagccctcccacgataccaaagttgtca

SEQ ID NO: 8972 - RNA, 41 nt, synthetic construct
  source 1..41: mol_type = other RNA
ggactgtggtcatgagtccttccacgataacaaagttgtca

SEQ ID NO: 8973 - RNA, 41 nt, synthetic construct
  source 1..41: mol_type = other RNA
ggactgtggtcatgagtcctcccacgataacaaagttgtca

SEQ ID NO: 8974 - RNA, 40 nt, synthetic construct
  source 1..40: mol_type = other RNA
agaccttaacccgaccaaagttgtcatggatgaccttggc

SEQ ID NO: 8975 - RNA, 40 nt, synthetic construct
  source 1..40: mol_type = other RNA
ggactgtggtcgtgagaccttaacccgaccaaagttgtca

SEQ ID NO: 8976 - RNA, 41 nt, synthetic construct
  source 1..41: mol_type = other RNA
agtccttccacgctatcaaagttgtcatggatgaccttggc

SEQ ID NO: 8977 - RNA, 41 nt, synthetic construct
  source 1..41: mol_type = other RNA
ggactgtggtcatgagatctcccaccataccaaagttgtca

SEQ ID NO: 8978 - RNA, 41 nt, synthetic construct
  source 1..41: mol_type = other RNA
agtcctcccacaataccaacgttgtcatggatgaccttggc

SEQ ID NO: 8979 - RNA, 41 nt, synthetic construct
  source 1..41: mol_type = other RNA
ggactgtggtcaagcgtccttcctcgttaccaaagttgtca

SEQ ID NO: 8980 - RNA, 41 nt, synthetic construct
  source 1..41: mol_type = other RNA
agtcctcgcacaataccaaagttgtcatggatgaccttggc

SEQ ID NO: 8981 - RNA, 41 nt, synthetic construct
  source 1..41: mol_type = other RNA
agtcccccgacgttagcaaaattgtcatggatgaccttggc

SEQ ID NO: 8982 - RNA, 41 nt, synthetic construct
  source 1..41: mol_type = other RNA
ggactgtggtcatgaggtcttccacgataccaaagttgtca

SEQ ID NO: 8983 - RNA, 41 nt, synthetic construct
  source 1..41: mol_type = other RNA
ggcagtgatggcatggactgtattcatgaggtctcccacga

SEQ ID NO: 8984 - RNA, 41 nt, synthetic construct
  source 1..41: mol_type = other RNA
ggcagtgatggcatggactgtattcatgaggtcttccacga

SEQ ID NO: 8985 - RNA, 41 nt, synthetic construct
  source 1..41: mol_type = other RNA
ggactgtggtcatgaggtctcccacgataccaaagttgtca

SEQ ID NO: 8986 - RNA, 41 nt, synthetic construct
  source 1..41: mol_type = other RNA
ggactgtggtgatgagtcattccacggtaccaaagttgtca

SEQ ID NO: 8987 - RNA, 41 nt, synthetic construct
  source 1..41: mol_type = other RNA
ggcagtgatggcatggactgtgatgatgagtcattccacgg

SEQ ID NO: 8988 - RNA, 40 nt, synthetic construct
  source 1..40: mol_type = other RNA
agcctcccccgctaccaaagttgtcatggatgaccttggc

SEQ ID NO: 8989 - RNA, 41 nt, synthetic construct
  source 1..41: mol_type = other RNA
ggcagtgatggcatggactgtggccatgaggccctccacga

SEQ ID NO: 8990 - RNA, 41 nt, synthetic construct
  source 1..41: mol_type = other RNA
ggactgtggtcatgaggccctccacgataacaaagttgtca

SEQ ID NO: 8991 - RNA, 41 nt, synthetic construct
  source 1..41: mol_type = other RNA
ggcagtgatggcatggactgtggtgatgagtcctcccacga

SEQ ID NO: 8992 - RNA, 41 nt, synthetic construct
  source 1..41: mol_type = other RNA
agtctttccacgataccaacgttgtcatggatgaccttggc

SEQ ID NO: 8993 - RNA, 41 nt, synthetic construct
  source 1..41: mol_type = other RNA
agtcttcccacgataccaacgttgtcatggatgaccttggc

SEQ ID NO: 8994 - RNA, 41 nt, synthetic construct
  source 1..41: mol_type = other RNA
ggactgtggttataagtccttgccaggtaccaaagttgtca

SEQ ID NO: 8995 - RNA, 41 nt, synthetic construct
  source 1..41: mol_type = other RNA
agtcctcgccaggtaccgcctttgtcatggatgaccttggc

SEQ ID NO: 8996 - RNA, 40 nt, synthetic construct
  source 1..40: mol_type = other RNA
ggactgtggtcatgagcctcccacggtaccaaagttgtca

SEQ ID NO: 8997 - RNA, 41 nt, synthetic construct
  source 1..41: mol_type = other RNA
agtcctcccacgatactgcagttgtcatggatgaccttggc

SEQ ID NO: 8998 - RNA, 41 nt, synthetic construct
  source 1..41: mol_type = other RNA
ggactgtggttatgagtctttccacggtgccaaagttgtca

SEQ ID NO: 8999 - RNA, 41 nt, synthetic construct
  source 1..41: mol_type = other RNA
ggactgtggtcatgagtcctcccccgttaccaaagttgtca

SEQ ID NO: 9000 - RNA, 43 nt, synthetic construct
  source 1..43: mol_type = other RNA
ggactgtggtcatgagtccctccacactaccccaaagttgtca

SEQ ID NO: 9001 - RNA, 41 nt, synthetic construct
  source 1..41: mol_type = other RNA
ggactgtggtcatgcgtcctcccacgatactaaagttgtca

SEQ ID NO: 9002 - RNA, 41 nt, synthetic construct
  source 1..41: mol_type = other RNA
ggcagtgatggcatggactgtggtccaatgtccctccacga

SEQ ID NO: 9003 - RNA, 41 nt, synthetic construct
  source 1..41: mol_type = other RNA
ggcagtgatggcatggactgtggtccaatgtccccccacga

SEQ ID NO: 9004 - RNA, 40 nt, synthetic construct
  source 1..40: mol_type = other RNA
gtccctccacgatagcaaaattgtcatggatgaccttggc

SEQ ID NO: 9005 - RNA, 41 nt, synthetic construct
  source 1..41: mol_type = other RNA
ggactgtggtcatgggtccacccacgataccaaagttgtca

SEQ ID NO: 9006 - RNA, 41 nt, synthetic construct
  source 1..41: mol_type = other RNA
ggcagtgatggcatggactgtggccatgagtccttccccgt

SEQ ID NO: 9007 - RNA, 41 nt, synthetic construct
  source 1..41: mol_type = other RNA
ggactgtggttatgagtccccccacagaacaaaagttgtca

SEQ ID NO: 9008 - RNA, 41 nt, synthetic construct
  source 1..41: mol_type = other RNA
ggactgtggttatgagtccctccacagaacaaaagttgtca

SEQ ID NO: 9009 - RNA, 41 nt, synthetic construct
  source 1..41: mol_type = other RNA
agaacttgcacgctacgaaagttgtcatggatgaccttggc

SEQ ID NO: 9010 - RNA, 41 nt, synthetic construct
  source 1..41: mol_type = other RNA
agaactcgcacgctacgaaagttgtcatggatgaccttggc

SEQ ID NO: 9011 - RNA, 41 nt, synthetic construct
  source 1..41: mol_type = other RNA
ggcagtgatggcatggactgtggtcaccgagcctcccccgt

SEQ ID NO: 9012 - RNA, 41 nt, synthetic construct
  source 1..41: mol_type = other RNA
ggcagtgatggcatggactgtggtcaccgagccttccccgt

SEQ ID NO: 9013 - RNA, 40 nt, synthetic construct
  source 1..40: mol_type = other RNA
agcctcccccgttactaaagttgtcatggatgaccttggc

SEQ ID NO: 9014 - RNA, 41 nt, synthetic construct
  source 1..41: mol_type = other RNA
agtcctcccgtgataccagagttgtcatggatgaccttggc

SEQ ID NO: 9015 - RNA, 41 nt, synthetic construct
  source 1..41: mol_type = other RNA
ggactgtggtcgcgagactttccacgatactaaagttgtca

SEQ ID NO: 9016 - RNA, 40 nt, synthetic construct
  source 1..40: mol_type = other RNA
agcccttcctgataccaaagttgtcatggatgaccttggc

SEQ ID NO: 9017 - RNA, 41 nt, synthetic construct
  source 1..41: mol_type = other RNA
ggactgtggtcctgagtccatccatgataccaaagttgtca

SEQ ID NO: 9018 - RNA, 41 nt, synthetic construct
  source 1..41: mol_type = other RNA
aatcttcccacgatgccagagttgtcatggatgaccttggc

SEQ ID NO: 9019 - RNA, 41 nt, synthetic construct
  source 1..41: mol_type = other RNA
ggcagtgatggcatggactgtagtcatgaatccttccacga

SEQ ID NO: 9020 - RNA, 41 nt, synthetic construct
  source 1..41: mol_type = other RNA
agtcctcccacggtaccaacgttgtcatggatgaccttggc

SEQ ID NO: 9021 - RNA, 41 nt, synthetic construct
  source 1..41: mol_type = other RNA
ggcagtgatggcatggactgtggtcttgagtcctcccacgg

SEQ ID NO: 9022 - RNA, 41 nt, synthetic construct
  source 1..41: mol_type = other RNA
ggcagtgatggcatggactgtggtgatcagtacctccacga

SEQ ID NO: 9023 - RNA, 41 nt, synthetic construct
  source 1..41: mol_type = other RNA
ggactgtggtgatcagtacctccacgatgccaaagttgtca

SEQ ID NO: 9024 - RNA, 41 nt, synthetic construct
  source 1..41: mol_type = other RNA
ggtcctcccacgataccaacgttgtcatggatgaccttggc

SEQ ID NO: 9025 - RNA, 41 nt, synthetic construct
  source 1..41: mol_type = other RNA
ggcagtgatggcatggactgtgaccataagtcctcccacga

SEQ ID NO: 9026 - RNA, 41 nt, synthetic construct
  source 1..41: mol_type = other RNA
ggactgtggtcataggtccttccacgataccaaagttgtca

SEQ ID NO: 9027 - RNA, 41 nt, synthetic construct
  source 1..41: mol_type = other RNA
ggcagtgatggcatggactgtgaccataagtccttccacga

SEQ ID NO: 9028 - RNA, 41 nt, synthetic construct
  source 1..41: mol_type = other RNA
ggactgtggtcataggtcctcccacgataccaaagttgtca

SEQ ID NO: 9029 - RNA, 40 nt, synthetic construct
  source 1..40: mol_type = other RNA
ggcagtgatggcatggactgtgatcatagtcgtttcacga

SEQ ID NO: 9030 - RNA, 41 nt, synthetic construct
  source 1..41: mol_type = other RNA
agcccctcctcgattcgaacgttgtcatggatgaccttggc

SEQ ID NO: 9031 - RNA, 41 nt, synthetic construct
  source 1..41: mol_type = other RNA
ggcagtgatggcatggactgtggccaggagcccttccacgc

SEQ ID NO: 9032 - RNA, 41 nt, synthetic construct
  source 1..41: mol_type = other RNA
ggactgtggtcaggagccctcccacgctaccaaagttgtca

SEQ ID NO: 9033 - RNA, 41 nt, synthetic construct
  source 1..41: mol_type = other RNA
ggcagtgatggcatggactgtggtcatgagccctcccacca

SEQ ID NO: 9034 - RNA, 41 nt, synthetic construct
  source 1..41: mol_type = other RNA
agtactcccaaggtaacgaagttgtcatggatgaccttggc

SEQ ID NO: 9035 - RNA, 41 nt, synthetic construct
  source 1..41: mol_type = other RNA
ggactgtggtcctgggtacttccacgataccaaagttgtca

SEQ ID NO: 9036 - RNA, 41 nt, synthetic construct
  source 1..41: mol_type = other RNA
agtccccccacgataacaaaattgtcatggatgaccttggc

SEQ ID NO: 9037 - RNA, 41 nt, synthetic construct
  source 1..41: mol_type = other RNA
ggactgtggtcgtgagtcctcccacaataccaaagttgtca

SEQ ID NO: 9038 - RNA, 41 nt, synthetic construct
  source 1..41: mol_type = other RNA
agcccttccccgttacgaaagttgtcatggatgaccttggc

SEQ ID NO: 9039 - RNA, 42 nt, synthetic construct
  source 1..42: mol_type = other RNA
ggcagtgatggcatggactgaggtcatgagtactcgcgacaa

SEQ ID NO: 9040 - RNA, 42 nt, synthetic construct
  source 1..42: mol_type = other RNA
agtactcgcgacaatcccaaagttgtcatggatgaccttggc

SEQ ID NO: 9041 - RNA, 41 nt, synthetic construct
  source 1..41: mol_type = other RNA
ggcagtgatggcatggactgaggtcatgagtactgcgacaa

SEQ ID NO: 9042 - RNA, 42 nt, synthetic construct
  source 1..42: mol_type = other RNA
ggactgtggtcgtgagtactcgcgacaatcccaaagttgtca

SEQ ID NO: 9043 - RNA, 41 nt, synthetic construct
  source 1..41: mol_type = other RNA
ggactgtggtagtgcgtccctccacgctaacaaagttgtca

SEQ ID NO: 9044 - RNA, 41 nt, synthetic construct
  source 1..41: mol_type = other RNA
ggactgtggtaatgagtcctcccacgctatcaaagttgtca

SEQ ID NO: 9045 - RNA, 41 nt, synthetic construct
  source 1..41: mol_type = other RNA
ggcagtgatggcatggactgtggttaggcgcccccgcacgg

SEQ ID NO: 9046 - RNA, 41 nt, synthetic construct
  source 1..41: mol_type = other RNA
ggcagtgatggcatggactgtgattatgagtccctccaccg

SEQ ID NO: 9047 - RNA, 41 nt, synthetic construct
  source 1..41: mol_type = other RNA
agtccctccaccgtaacaaagttgtcatggatgaccttggc

SEQ ID NO: 9048 - RNA, 41 nt, synthetic construct
  source 1..41: mol_type = other RNA
ggcagtgatggcatggactgtgattatgagtccccccaccg

SEQ ID NO: 9049 - RNA, 41 nt, synthetic construct
  source 1..41: mol_type = other RNA
ggcagtgatggcatggactgtgcccatcagtccccccacgg

SEQ ID NO: 9050 - RNA, 41 nt, synthetic construct
  source 1..41: mol_type = other RNA
ggactgtggtcatcagtccctccacggtaacaaagttgtca

SEQ ID NO: 9051 - RNA, 53 nt, synthetic construct
  source 1..53: mol_type = other RNA
ggcagtgatggcatggactgtggttaagagattccaacttcctcatttcctaa

SEQ ID NO: 9052 - RNA, 53 nt, synthetic construct
  source 1..53: mol_type = other RNA
ggactgtggttgagagattccaacttcctcatttcctaataccaaagttgtca

SEQ ID NO: 9053 - RNA, 41 nt, synthetic construct
  source 1..41: mol_type = other RNA
cgtccccccccactaccaaagttgtcatggatgaccttggc

SEQ ID NO: 9054 - RNA, 41 nt, synthetic construct
  source 1..41: mol_type = other RNA
ggcagtgatggcatggactgtggcgatgaaccctcccacgg

SEQ ID NO: 9055 - RNA, 41 nt, synthetic construct
  source 1..41: mol_type = other RNA
ggactgtggtgatgaaccctcccatggtaccaaagttgtca

SEQ ID NO: 9056 - RNA, 41 nt, synthetic construct
  source 1..41: mol_type = other RNA
agcccctccaccataagaaagttgtcatggatgaccttggc

SEQ ID NO: 9057 - RNA, 41 nt, synthetic construct
  source 1..41: mol_type = other RNA
ggactgtggtaatgagtgcctccacgatagcaaagttgtca

SEQ ID NO: 9058 - RNA, 41 nt, synthetic construct
  source 1..41: mol_type = other RNA
ggcagtgatggcatggactgtgggaatgagtgcctccacga

SEQ ID NO: 9059 - RNA, 41 nt, synthetic construct
  source 1..41: mol_type = other RNA
ggcagtgatggcatggactgtgcatatgagtacctgcactc

SEQ ID NO: 9060 - RNA, 40 nt, synthetic construct
  source 1..40: mol_type = other RNA
ggactgtggtatgagtacccgcactctaacaaagttgtca

SEQ ID NO: 9061 - RNA, 41 nt, synthetic construct
  source 1..41: mol_type = other RNA
ggactgtggtcataagtcttcccacggtatcaaagttgtca

SEQ ID NO: 9062 - RNA, 41 nt, synthetic construct
  source 1..41: mol_type = other RNA
ggcagtgatggcatggactgtagtcataagtgctcccacga

SEQ ID NO: 9063 - RNA, 41 nt, synthetic construct
  source 1..41: mol_type = other RNA
ggactgtggtcataagtgctcccacgaacccaaagttgtca

SEQ ID NO: 9064 - RNA, 41 nt, synthetic construct
  source 1..41: mol_type = other RNA
ggcagtgatggcatggactgtagtcaagaatccttccccgt

SEQ ID NO: 9065 - RNA, 41 nt, synthetic construct
  source 1..41: mol_type = other RNA
ggactgtggtcaagaatcctcccccgttaccaaagttgtca

SEQ ID NO: 9066 - RNA, 41 nt, synthetic construct
  source 1..41: mol_type = other RNA
aatccttccccgttaccagacttgtcatggatgaccttggc

SEQ ID NO: 9067 - RNA, 41 nt, synthetic construct
  source 1..41: mol_type = other RNA
ggactgtggtaatgagtactcccccgctaccaaagttgtca

SEQ ID NO: 9068 - RNA, 41 nt, synthetic construct
  source 1..41: mol_type = other RNA
ggactgtggtcatgagtcctcccacgataccaaagttgtca

SEQ ID NO: 9069 - RNA, 41 nt, synthetic construct
  source 1..41: mol_type = other RNA
ggactgtggtcatgagtcattccacgataccaaagttgtca

SEQ ID NO: 9070 - RNA, 41 nt, synthetic construct
  source 1..41: mol_type = other RNA
ggcagtgatggcatggactgtgaccatgagtcattccacga

SEQ ID NO: 9071 - RNA, 41 nt, synthetic construct
  source 1..41: mol_type = other RNA
ggcagtgatggcatggactgtagtcatgagtccttccacgg

SEQ ID NO: 9072 - RNA, 41 nt, synthetic construct
  source 1..41: mol_type = other RNA
ggactgtggtcatgagtctttccacggtgccaaagttgtca

SEQ ID NO: 9073 - RNA, 41 nt, synthetic construct
  source 1..41: mol_type = other RNA
ggcagtgatggcatggactgtggtcatgagtgcctccacga

SEQ ID NO: 9074 - RNA, 41 nt, synthetic construct
  source 1..41: mol_type = other RNA
ggactgtggtcatgagtccttccacggtaccaaagttgtca

SEQ ID NO: 9075 - RNA, 41 nt, synthetic construct
  source 1..41: mol_type = other RNA
ggactgtggtcatgagtcctcccacggtaccaaagttgtca

SEQ ID NO: 9076 - RNA, 41 nt, synthetic construct
  source 1..41: mol_type = other RNA
ggcagtgatggcatggactgtggtcatgagtcgttccacgg

SEQ ID NO: 9077 - RNA, 41 nt, synthetic construct
  source 1..41: mol_type = other RNA
ggcagtgatggcatggactgtggtcatgagtcgtcccacgg

SEQ ID NO: 9078 - RNA, 41 nt, synthetic construct
  source 1..41: mol_type = other RNA
agtcgttccacggtaccatagttgtcatggatgaccttggc

SEQ ID NO: 9079 - RNA, 41 nt, synthetic construct
  source 1..41: mol_type = other RNA
ggactgtggtcatgagtcgttccacggtaccaaagttgtca

SEQ ID NO: 9080 - RNA, 41 nt, synthetic construct
  source 1..41: mol_type = other RNA
ggactgtggtcatgagtactcccccgttaccaaagttgtca

SEQ ID NO: 9081 - RNA, 41 nt, synthetic construct
  source 1..41: mol_type = other RNA
agtccttccacactatcacagttgtcatggatgaccttggc

SEQ ID NO: 9082 - RNA, 41 nt, synthetic construct
  source 1..41: mol_type = other RNA
ggactgtggtaatgagtccttccacactatcaaagttgtca

SEQ ID NO: 9083 - RNA, 41 nt, synthetic construct
  source 1..41: mol_type = other RNA
ggactgtggtaatgagtcctcccacactatcaaagttgtca

SEQ ID NO: 9084 - RNA, 41 nt, synthetic construct
  source 1..41: mol_type = other RNA
agtacttccacgataccaaagttgtcatggatgaccttggc

SEQ ID NO: 9085 - RNA, 41 nt, synthetic construct
  source 1..41: mol_type = other RNA
ggcagtgatggcatggactgtggtcatgagtccccacacga

SEQ ID NO: 9086 - RNA, 41 nt, synthetic construct
  source 1..41: mol_type = other RNA
ggactgtggtcatgagtccccacatgatactaaagttgtca

SEQ ID NO: 9087 - RNA, 41 nt, synthetic construct
  source 1..41: mol_type = other RNA
ggcagtgatggcatggactgtggtcatgagtcctcccacgc

SEQ ID NO: 9088 - RNA, 41 nt, synthetic construct
  source 1..41: mol_type = other RNA
ggactgtggtcatgagtcctcccacgctaccaaagttgtca

SEQ ID NO: 9089 - RNA, 41 nt, synthetic construct
  source 1..41: mol_type = other RNA
agtcctcccacgctaccacagttgtcatggatgaccttggc

SEQ ID NO: 9090 - RNA, 41 nt, synthetic construct
  source 1..41: mol_type = other RNA
ggcagtgatggcatggactgtggtcatgagtccttccacac

SEQ ID NO: 9091 - RNA, 41 nt, synthetic construct
  source 1..41: mol_type = other RNA
ggcagtgatggcatggactgtggtcatgaatccttccacga

SEQ ID NO: 9092 - RNA, 41 nt, synthetic construct
  source 1..41: mol_type = other RNA
ggcagtgatggcatggactgtggtcatgaatcctcccacga

SEQ ID NO: 9093 - RNA, 41 nt, synthetic construct
  source 1..41: mol_type = other RNA
aatcctcccacgatcccaaaattgtcatggatgaccttggc

SEQ ID NO: 9094 - RNA, 41 nt, synthetic construct
  source 1..41: mol_type = other RNA
ggactgtggtcatgcgtccttccgcgctaccaaagttgtca

SEQ ID NO: 9095 - RNA, 41 nt, synthetic construct
  source 1..41: mol_type = other RNA
agccctcccacgataccaaagttgtcatggatgaccttggc

SEQ ID NO: 9096 - RNA, 41 nt, synthetic construct
  source 1..41: mol_type = other RNA
ggcagtgatggcatggactgtgaccatgagcccttccacga

SEQ ID NO: 9097 - RNA, 41 nt, synthetic construct
  source 1..41: mol_type = other RNA
ggcagtgatggcatggactgtgctcatgagtacctccacga

SEQ ID NO: 9098 - RNA, 42 nt, synthetic construct
  source 1..42: mol_type = other RNA
agtacctccacgataactaaagttgtcatggatgaccttggc

SEQ ID NO: 9099 - RNA, 42 nt, synthetic construct
  source 1..42: mol_type = other RNA
ggactgtggtcgtgagtacccccacgataactaaagttgtca

SEQ ID NO: 9100 - RNA, 41 nt, synthetic construct
  source 1..41: mol_type = other RNA
agtccttccacgataacgtagttgtcatggatgaccttggc

SEQ ID NO: 9101 - RNA, 41 nt, synthetic construct
  source 1..41: mol_type = other RNA
ggactgtggtcatgagtccttccacgctatcaaagttgtca

SEQ ID NO: 9102 - RNA, 41 nt, synthetic construct
  source 1..41: mol_type = other RNA
ggcagtgatggcatggactgtgttcatgagtcctcccacgc

SEQ ID NO: 9103 - RNA, 41 nt, synthetic construct
  source 1..41: mol_type = other RNA
ggcagtgatggcatggactgtggtcatgagaccttccacca

SEQ ID NO: 9104 - RNA, 41 nt, synthetic construct
  source 1..41: mol_type = other RNA
ggactgtggtcatgagtccttccacaataccaaagttgtca

SEQ ID NO: 9105 - RNA, 41 nt, synthetic construct
  source 1..41: mol_type = other RNA
ggactgtggtcaagcgtcctccctcgttaccaaagttgtca

SEQ ID NO: 9106 - RNA, 41 nt, synthetic construct
  source 1..41: mol_type = other RNA
acccacgcgcaactctgcaagttgtcatggatgaccttggc

SEQ ID NO: 9107 - RNA, 41 nt, synthetic construct
  source 1..41: mol_type = other RNA
atccacgcgcaactctgcaagttgtcatggatgaccttggc

SEQ ID NO: 9108 - RNA, 41 nt, synthetic construct
  source 1..41: mol_type = other RNA
ggcagtgatggcatggactgtgcctatgagtcccccgacgt

SEQ ID NO: 9109 - RNA, 41 nt, synthetic construct
  source 1..41: mol_type = other RNA
agtccctcgacgttagcaaaattgtcatggatgaccttggc

SEQ ID NO: 9110 - RNA, 41 nt, synthetic construct
  source 1..41: mol_type = other RNA
ggactgtggttatgagtccctcgacgttagcaaagttgtca

SEQ ID NO: 9111 - RNA, 41 nt, synthetic construct
  source 1..41: mol_type = other RNA
aggtcttccacgataccaatgttgtcatggatgaccttggc

SEQ ID NO: 9112 - RNA, 41 nt, synthetic construct
  source 1..41: mol_type = other RNA
aggtctcccacgataccaatgttgtcatggatgaccttggc

SEQ ID NO: 9113 - RNA, 41 nt, synthetic construct
  source 1..41: mol_type = other RNA
ggactgtggtcatgagtccccccgcgataccaaagttgtca

SEQ ID NO: 9114 - RNA, 41 nt, synthetic construct
  source 1..41: mol_type = other RNA
ggcagtgatggcatggactgtgcccatgagtccccccgcga

SEQ ID NO: 9115 - RNA, 41 nt, synthetic construct
  source 1..41: mol_type = other RNA
ggcagtgatggcatggactgtgcccatgagtcccaccgcga

SEQ ID NO: 9116 - RNA, 41 nt, synthetic construct
  source 1..41: mol_type = other RNA
agtccccccgcgataccaacattgtcatggatgaccttggc

SEQ ID NO: 9117 - RNA, 41 nt, synthetic construct
  source 1..41: mol_type = other RNA
agtcccaccgcgataccaacattgtcatggatgaccttggc

SEQ ID NO: 9118 - RNA, 41 nt, synthetic construct
  source 1..41: mol_type = other RNA
ggcagtgatggcatggactgtgatgatgagtcatcccacgg

SEQ ID NO: 9119 - RNA, 41 nt, synthetic construct
  source 1..41: mol_type = other RNA
ggactgtggtgatgagtcatcccacggtaccaaagttgtca

SEQ ID NO: 9120 - RNA, 40 nt, synthetic construct
  source 1..40: mol_type = other RNA
ggactgtggtcatgagcctcccccgctaccaaagttgtca

SEQ ID NO: 9121 - RNA, 41 nt, synthetic construct
  source 1..41: mol_type = other RNA
agtccttccccgatatcaaggttgtcatggatgaccttggc

SEQ ID NO: 9122 - RNA, 41 nt, synthetic construct
  source 1..41: mol_type = other RNA
ggactgtggtaatgagtccttccccgatatcaaagttgtca

SEQ ID NO: 9123 - RNA, 41 nt, synthetic construct
  source 1..41: mol_type = other RNA
ggactgtggtaatgagtcctcccccgatatcaaagttgtca

SEQ ID NO: 9124 - RNA, 41 nt, synthetic construct
  source 1..41: mol_type = other RNA
ggactgtggtgatgagtcttcccacgataccaaagttgtca

SEQ ID NO: 9125 - RNA, 41 nt, synthetic construct
  source 1..41: mol_type = other RNA
agtccttgccaggtaccgcctttgtcatggatgaccttggc

SEQ ID NO: 9126 - RNA, 41 nt, synthetic construct
  source 1..41: mol_type = other RNA
ggactgtggttataagtcctcgccaggtaccaaagttgtca

SEQ ID NO: 9127 - RNA, 40 nt, synthetic construct
  source 1..40: mol_type = other RNA
agcctcccacggtaccaaagttgtcatggatgaccttggc

SEQ ID NO: 9128 - RNA, 41 nt, synthetic construct
  source 1..41: mol_type = other RNA
ggcagtgatggcatggactgtggtcataagtacttcccaga

SEQ ID NO: 9129 - RNA, 41 nt, synthetic construct
  source 1..41: mol_type = other RNA
ggcagtgatggcatggactgaatgtatgagtcctcccacgg

SEQ ID NO: 9130 - RNA, 41 nt, synthetic construct
  source 1..41: mol_type = other RNA
ggcagtgatggcatggactgtggtcatgagtcctcccacga

SEQ ID NO: 9131 - RNA, 41 nt, synthetic construct
  source 1..41: mol_type = other RNA
agtccttccacgatacaaatgttgtcatggatgaccttggc

SEQ ID NO: 9132 - RNA, 41 nt, synthetic construct
  source 1..41: mol_type = other RNA
agtccttccacggtaccaaagttgtcatggatgaccttggc

SEQ ID NO: 9133 - RNA, 41 nt, synthetic construct
  source 1..41: mol_type = other RNA
agtccttccccgttaccaaagttgtcatggatgaccttggc

SEQ ID NO: 9134 - RNA, 41 nt, synthetic construct
  source 1..41: mol_type = other RNA
agtcctcccccgttaccaaagttgtcatggatgaccttggc

SEQ ID NO: 9135 - RNA, 41 nt, synthetic construct
  source 1..41: mol_type = other RNA
ggcagtgatggcatggactgtggtcatgagtcctcccccgt

SEQ ID NO: 9136 - RNA, 42 nt, synthetic construct
  source 1..42: mol_type = other RNA
agtccctccacactaccccaacttgtcatggatgaccttggc

SEQ ID NO: 9137 - RNA, 41 nt, synthetic construct
  source 1..41: mol_type = other RNA
cgtccttccacgatactaatgttgtcatggatgaccttggc

SEQ ID NO: 9138 - RNA, 40 nt, synthetic construct
  source 1..40: mol_type = other RNA
ggactgtggtcaatgtccccccacgatagcaaagttgtca

SEQ ID NO: 9139 - RNA, 40 nt, synthetic construct
  source 1..40: mol_type = other RNA
ggactgtggtcaatgtccctccacgatagcaaagttgtca

SEQ ID NO: 9140 - RNA, 41 nt, synthetic construct
  source 1..41: mol_type = other RNA
ggcagtgatggcatggactgtgatcttgagtccttccacga

SEQ ID NO: 9141 - RNA, 38 nt, synthetic construct
  source 1..38: mol_type = other RNA
agtcctcccacgataccgttgtcatggatgaccttggc

SEQ ID NO: 9142 - RNA, 41 nt, synthetic construct
  source 1..41: mol_type = other RNA
ggactgtggtactgagtcctccctcgttaccaaagttgtca

SEQ ID NO: 9143 - RNA, 40 nt, synthetic construct
  source 1..40: mol_type = other RNA
ggtccacccacgataccaagttgtcatggatgaccttggc

SEQ ID NO: 9144 - RNA, 41 nt, synthetic construct
  source 1..41: mol_type = other RNA
ggcagtgatggcatggactgtggttctgagcccacccacga

SEQ ID NO: 9145 - RNA, 41 nt, synthetic construct
  source 1..41: mol_type = other RNA
agcccacccgtgatagcaatgttgtcatggatgaccttggc

SEQ ID NO: 9146 - RNA, 41 nt, synthetic construct
  source 1..41: mol_type = other RNA
ggactgtggttctgagcccacccgtgatagcaaagttgtca

SEQ ID NO: 9147 - RNA, 41 nt, synthetic construct
  source 1..41: mol_type = other RNA
ggactgtggtcgccgagccttccccgttactaaagttgtca

SEQ ID NO: 9148 - RNA, 41 nt, synthetic construct
  source 1..41: mol_type = other RNA
ggcagtgatggcatggactgtggtcatgagtcctcccgcga

SEQ ID NO: 9149 - RNA, 41 nt, synthetic construct
  source 1..41: mol_type = other RNA
ggcagtgatggcatggactgtggtcacgagaccttccacga

SEQ ID NO: 9150 - RNA, 41 nt, synthetic construct
  source 1..41: mol_type = other RNA
agacttcccacgatactaaagttgtcatggatgaccttggc

SEQ ID NO: 9151 - RNA, 41 nt, synthetic construct
  source 1..41: mol_type = other RNA
ggactgtggtcgcgagacttcccacgatactaaagttgtca

SEQ ID NO: 9152 - RNA, 41 nt, synthetic construct
  source 1..41: mol_type = other RNA
ggactgtggtcatgagccatcccccgttaccaaagttgtca

SEQ ID NO: 9153 - RNA, 41 nt, synthetic construct
  source 1..41: mol_type = other RNA
agccattccccgttaccacagttgtcatggatgaccttggc

SEQ ID NO: 9154 - RNA, 41 nt, synthetic construct
  source 1..41: mol_type = other RNA
ggactgtggtcatgagccattccccgttaccaaagttgtca

SEQ ID NO: 9155 - RNA, 41 nt, synthetic construct
  source 1..41: mol_type = other RNA
agtcctcgcccgatgccaaacttgtcatggatgaccttggc

SEQ ID NO: 9156 - RNA, 41 nt, synthetic construct
  source 1..41: mol_type = other RNA
ggcagtgatggcatggactgtggtcctgagtccacccacga

SEQ ID NO: 9157 - RNA, 41 nt, synthetic construct
  source 1..41: mol_type = other RNA
agtccacccatgataccaaagttgtcatggatgaccttggc

SEQ ID NO: 9158 - RNA, 41 nt, synthetic construct
  source 1..41: mol_type = other RNA
ggactgtggtcctgagtccacccatgataccaaagttgtca

SEQ ID NO: 9159 - RNA, 41 nt, synthetic construct
  source 1..41: mol_type = other RNA
ggcagtgatggcatggactgtggtcacgagtcctcccacgg

SEQ ID NO: 9160 - RNA, 41 nt, synthetic construct
  source 1..41: mol_type = other RNA
ggactgtggtcacgagtcctcccacggtaccaaagttgtca

SEQ ID NO: 9161 - RNA, 41 nt, synthetic construct
  source 1..41: mol_type = other RNA
ggactgtggtcatgagtcccccccgattaccaaagttgtca

SEQ ID NO: 9162 - RNA, 41 nt, synthetic construct
  source 1..41: mol_type = other RNA
ggcagtgatggcatggactgcggtacatgagtcccccccga

SEQ ID NO: 9163 - RNA, 57 nt, synthetic construct
  source 1..57: mol_type = other RNA
ggcagtgatggcatggactgtgaaaaggcaaaatggtctacatcagtccctgcacgg

SEQ ID NO: 9164 - RNA, 57 nt, synthetic construct
  source 1..57: mol_type = other RNA
ggcagtgatggcatggactgtgaaaaggcaaaatggtctacatcagtccccgcacgg

SEQ ID NO: 9165 - RNA, 44 nt, synthetic construct
  source 1..44: mol_type = other RNA
ggactgtggtctacatcagtccctgcacggtaccaaagttgtca

SEQ ID NO: 9166 - RNA, 44 nt, synthetic construct
  source 1..44: mol_type = other RNA
ggactgtggtctacatcagtccccgcacggtaccaaagttgtca

SEQ ID NO: 9167 - RNA, 44 nt, synthetic construct
  source 1..44: mol_type = other RNA
agtccctccacgctaacatccaagttgtcatggatgaccttggc

SEQ ID NO: 9168 - RNA, 41 nt, synthetic construct
  source 1..41: mol_type = other RNA
ggcagtgatggcatggactgtgatcatgagtccctccacgc

SEQ ID NO: 9169 - RNA, 41 nt, synthetic construct
  source 1..41: mol_type = other RNA
agtcctcccacggtaccacagttgtcatggatgaccttggc

SEQ ID NO: 9170 - RNA, 41 nt, synthetic construct
  source 1..41: mol_type = other RNA
ggactgtggtcttgagtcctcccacggtaccaaagttgtca

SEQ ID NO: 9171 - RNA, 41 nt, synthetic construct
  source 1..41: mol_type = other RNA
ggcagtgatggcatggactgtggtgatcagtacccccacga

SEQ ID NO: 9172 - RNA, 40 nt, synthetic construct
  source 1..40: mol_type = other RNA
ggactgtggtcatagtcgtttcacgataccaaagttgtca

SEQ ID NO: 9173 - RNA, 40 nt, synthetic construct
  source 1..40: mol_type = other RNA
ggactgtggtcatagtcgtctcacgataccaaagttgtca

SEQ ID NO: 9174 - RNA, 42 nt, synthetic construct
  source 1..42: mol_type = other RNA
agtcgtttcacgatacctaaagttgtcatggatgaccttggc

SEQ ID NO: 9175 - RNA, 41 nt, synthetic construct
  source 1..41: mol_type = other RNA
agccccccctcgattcgaacgttgtcatggatgaccttggc

SEQ ID NO: 9176 - RNA, 41 nt, synthetic construct
  source 1..41: mol_type = other RNA
ggactgtggtgatcagccccccctcgattcgaaagttgtca

SEQ ID NO: 9177 - RNA, 41 nt, synthetic construct
  source 1..41: mol_type = other RNA
ggactgtggtgatcagcccctcctcgattcgaaagttgtca

SEQ ID NO: 9178 - RNA, 41 nt, synthetic construct
  source 1..41: mol_type = other RNA
ggactgtggtcaggagcccttccacgctaccaaagttgtca

SEQ ID NO: 9179 - RNA, 41 nt, synthetic construct
  source 1..41: mol_type = other RNA
agcccttccaccataccaacgttgtcatggatgaccttggc

SEQ ID NO: 9180 - RNA, 41 nt, synthetic construct
  source 1..41: mol_type = other RNA
ggcagtgatggcatggactgtggtcatgagtactcccaagg

SEQ ID NO: 9181 - RNA, 41 nt, synthetic construct
  source 1..41: mol_type = other RNA
ggcagtgatggcatggactgtggtcctgagtacttccacga

SEQ ID NO: 9182 - RNA, 41 nt, synthetic construct
  source 1..41: mol_type = other RNA
ggtacttccacgataccacagttgtcatggatgaccttggc

SEQ ID NO: 9183 - RNA, 41 nt, synthetic construct
  source 1..41: mol_type = other RNA
ggtactcccacgataccacagttgtcatggatgaccttggc

SEQ ID NO: 9184 - RNA, 41 nt, synthetic construct
  source 1..41: mol_type = other RNA
agtccctccacgataacaaaattgtcatggatgaccttggc

SEQ ID NO: 9185 - RNA, 43 nt, synthetic construct
  source 1..43: mol_type = other RNA
ggactgtggtcatgagtcctcccacgaacagccaaagttgtca

SEQ ID NO: 9186 - RNA, 41 nt, synthetic construct
  source 1..41: mol_type = other RNA
agtcctcccacaataccaaccttgtcatggatgaccttggc

SEQ ID NO: 9187 - RNA, 41 nt, synthetic construct
  source 1..41: mol_type = other RNA
agtcctcccacgaaaccacagttgtcatggatgaccttggc

SEQ ID NO: 9188 - RNA, 41 nt, synthetic construct
  source 1..41: mol_type = other RNA
ggcagtgatggcatggactgtggtaatgagtacttccacac

SEQ ID NO: 9189 - RNA, 41 nt, synthetic construct
  source 1..41: mol_type = other RNA
agtacttccacactacgaaagttgtcatggatgaccttggc

SEQ ID NO: 9190 - RNA, 41 nt, synthetic construct
  source 1..41: mol_type = other RNA
agtactcccacactacgaaagttgtcatggatgaccttggc

SEQ ID NO: 9191 - RNA, 41 nt, synthetic construct
  source 1..41: mol_type = other RNA
ggcagtgatggcatggactgtggccatgagcccttccccgt

SEQ ID NO: 9192 - RNA, 41 nt, synthetic construct
  source 1..41: mol_type = other RNA
agccctcccccgttacgaaagttgtcatggatgaccttggc

SEQ ID NO: 9193 - RNA, 41 nt, synthetic construct
  source 1..41: mol_type = other RNA
ggactgtggtcatgagcccttccccgttacgaaagttgtca

SEQ ID NO: 9194 - RNA, 41 nt, synthetic construct
  source 1..41: mol_type = other RNA
agtccttgcacgttaccaacgttgtcatggatgaccttggc

SEQ ID NO: 9195 - RNA, 41 nt, synthetic construct
  source 1..41: mol_type = other RNA
agtactgcgacaatcccaaagttgtcatggatgaccttggc

SEQ ID NO: 9196 - RNA, 41 nt, synthetic construct
  source 1..41: mol_type = other RNA
agtccttccacgctaccaaatttgtcatggatgaccttggc

SEQ ID NO: 9197 - RNA, 41 nt, synthetic construct
  source 1..41: mol_type = other RNA
agtcctcccacgctaccaaatttgtcatggatgaccttggc

SEQ ID NO: 9198 - RNA, 41 nt, synthetic construct
  source 1..41: mol_type = other RNA
ggcagtgatggcatggactgtggcaatgcgtccccccacgc

SEQ ID NO: 9199 - RNA, 41 nt, synthetic construct
  source 1..41: mol_type = other RNA
agtccctccacgataccaaaattgtcatggatgaccttggc

SEQ ID NO: 9200 - RNA, 40 nt, synthetic construct
  source 1..40: mol_type = other RNA
ggactgtggtttgagtccccccacgataccaaagttgtca

SEQ ID NO: 9201 - RNA, 41 nt, synthetic construct
  source 1..41: mol_type = other RNA
agtccccccacgataccaaaattgtcatggatgaccttggc

SEQ ID NO: 9202 - RNA, 45 nt, synthetic construct
  source 1..45: mol_type = other RNA
ggactgtggttaggcgcccccgtacgggagtgaccaaagttgtca

SEQ ID NO: 9203 - RNA, 44 nt, synthetic construct
  source 1..44: mol_type = other RNA
cgcccctgtacgggagtgaccaacttgtcatggatgaccttggc

SEQ ID NO: 9204 - RNA, 41 nt, synthetic construct
  source 1..41: mol_type = other RNA
agtccccccaccgtaacaaagttgtcatggatgaccttggc

SEQ ID NO: 9205 - RNA, 41 nt, synthetic construct
  source 1..41: mol_type = other RNA
agtactcccgcgataacaaagttgtcatggatgaccttggc

SEQ ID NO: 9206 - RNA, 41 nt, synthetic construct
  source 1..41: mol_type = other RNA
ggactgtggtcatcagtccccccacggtaacaaagttgtca

SEQ ID NO: 9207 - RNA, 41 nt, synthetic construct
  source 1..41: mol_type = other RNA
agtccctccacggtaacaactttgtcatggatgaccttggc

SEQ ID NO: 9208 - RNA, 41 nt, synthetic construct
  source 1..41: mol_type = other RNA
agtccccccacggtaacaactttgtcatggatgaccttggc

SEQ ID NO: 9209 - RNA, 41 nt, synthetic construct
  source 1..41: mol_type = other RNA
agtcctcccacaataccaaagttgtcatggatgaccttggc

SEQ ID NO: 9210 - RNA, 41 nt, synthetic construct
  source 1..41: mol_type = other RNA
ggcagtgatggcatggactgtggagatgagtcctcccacaa

SEQ ID NO: 9211 - RNA, 53 nt, synthetic construct
  source 1..53: mol_type = other RNA
ggcagtgatggcatggactgtggttaagagattccaactccctcatttcctaa

SEQ ID NO: 9212 - RNA, 53 nt, synthetic construct
  source 1..53: mol_type = other RNA
ggactgtggttgagagattccaactccctcatttcctaataccaaagttgtca

SEQ ID NO: 9213 - RNA, 41 nt, synthetic construct
  source 1..41: mol_type = other RNA
cgtccctccccactaccaaagttgtcatggatgaccttggc

SEQ ID NO: 9214 - RNA, 41 nt, synthetic construct
  source 1..41: mol_type = other RNA
ggcagtgatggcatggactgtgatcaagcgtccccccccac

SEQ ID NO: 9215 - RNA, 41 nt, synthetic construct
  source 1..41: mol_type = other RNA
ggactgtggtcaagcgtccctccccactaccaaagttgtca

SEQ ID NO: 9216 - RNA, 41 nt, synthetic construct
  source 1..41: mol_type = other RNA
ggactgtggtcaagcgtccccccccactaccaaagttgtca

SEQ ID NO: 9217 - RNA, 41 nt, synthetic construct
  source 1..41: mol_type = other RNA
agtccccccacgataacaaagttgtcatggatgaccttggc

SEQ ID NO: 9218 - RNA, 41 nt, synthetic construct
  source 1..41: mol_type = other RNA
ggcagtgatggcatggactgtggacatgagccctttcacga

SEQ ID NO: 9219 - RNA, 41 nt, synthetic construct
  source 1..41: mol_type = other RNA
agccctttcacgatcccaaagttgtcatggatgaccttggc

SEQ ID NO: 9220 - RNA, 41 nt, synthetic construct
  source 1..41: mol_type = other RNA
ggactgtggtcatgagccctttcacgatcccaaagttgtca

SEQ ID NO: 9221 - RNA, 41 nt, synthetic construct
  source 1..41: mol_type = other RNA
ggactgtggtcatgagccctctcacgatcccaaagttgtca

SEQ ID NO: 9222 - RNA, 41 nt, synthetic construct
  source 1..41: mol_type = other RNA
ggcagtgatggcatggactgtgaccaggagtcgctccacca

SEQ ID NO: 9223 - RNA, 41 nt, synthetic construct
  source 1..41: mol_type = other RNA
agtcgctccaccataacaaaattgtcatggatgaccttggc

SEQ ID NO: 9224 - RNA, 41 nt, synthetic construct
  source 1..41: mol_type = other RNA
agtcgccccaccataacaaaattgtcatggatgaccttggc

SEQ ID NO: 9225 - RNA, 41 nt, synthetic construct
  source 1..41: mol_type = other RNA
ggactgtggtcaggagtcgctccaccataacaaagttgtca

SEQ ID NO: 9226 - RNA, 41 nt, synthetic construct
  source 1..41: mol_type = other RNA
ggactgtggtcaggagtcgccccaccataacaaagttgtca

SEQ ID NO: 9227 - RNA, 40 nt, synthetic construct
  source 1..40: mol_type = other RNA
ggactgtggtcgcagtccccccacgataccaaagttgtca

SEQ ID NO: 9228 - RNA, 41 nt, synthetic construct
  source 1..41: mol_type = other RNA
aaccctcccatggtaccaaatttgtcatggatgaccttggc

SEQ ID NO: 9229 - RNA, 41 nt, synthetic construct
  source 1..41: mol_type = other RNA
ggactgtggtgatgaacccttccatggtaccaaagttgtca

SEQ ID NO: 9230 - RNA, 41 nt, synthetic construct
  source 1..41: mol_type = other RNA
agcccccccaccataagaaagttgtcatggatgaccttggc

SEQ ID NO: 9231 - RNA, 41 nt, synthetic construct
  source 1..41: mol_type = other RNA
ggcagtgatggcatggactgtagtcatgagtgctcccacga

SEQ ID NO: 9232 - RNA, 41 nt, synthetic construct
  source 1..41: mol_type = other RNA
ggcagtgatggcatggactgtgggaatgagtgcccccacga

SEQ ID NO: 9233 - RNA, 41 nt, synthetic construct
  source 1..41: mol_type = other RNA
agtgcctccacgatagcaacattgtcatggatgaccttggc

SEQ ID NO: 9234 - RNA, 41 nt, synthetic construct
  source 1..41: mol_type = other RNA
agtacctgcactctaacaaaattgtcatggatgaccttggc

SEQ ID NO: 9235 - RNA, 45 nt, synthetic construct
  source 1..45: mol_type = other RNA
ggaatccgacgcgtctgcagccaaattgtcatggatgaccttggc

SEQ ID NO: 9236 - RNA, 45 nt, synthetic construct
  source 1..45: mol_type = other RNA
ggaattcgacgcgtctgcagccaaattgtcatggatgaccttggc

SEQ ID NO: 9237 - RNA, 46 nt, synthetic construct
  source 1..46: mol_type = other RNA
ggactgtggttgtgggaattcgacgcgtctgcagccaaagttgtca

SEQ ID NO: 9238 - RNA, 46 nt, synthetic construct
  source 1..46: mol_type = other RNA
ggactgtggttgtgggaatccgacgcgtctgcagccaaagttgtca

SEQ ID NO: 9239 - RNA, 41 nt, synthetic construct
  source 1..41: mol_type = other RNA
agtctttccacggtatcaatgttgtcatggatgaccttggc

SEQ ID NO: 9240 - RNA, 41 nt, synthetic construct
  source 1..41: mol_type = other RNA
ggactgtggtcataagtctttccacggtatcaaagttgtca

SEQ ID NO: 9241 - RNA, 41 nt, synthetic construct
  source 1..41: mol_type = other RNA
ggactgtggtcatgagtccctccacgctaataaagttgtca

SEQ ID NO: 9242 - RNA, 41 nt, synthetic construct
  source 1..41: mol_type = other RNA
ggcagtgatggcatggactgtgtacatgagtccccccacgc

SEQ ID NO: 9243 - RNA, 41 nt, synthetic construct
  source 1..41: mol_type = other RNA
agtccctccacgctaataaagttgtcatggatgaccttggc

SEQ ID NO: 9244 - RNA, 41 nt, synthetic construct
  source 1..41: mol_type = other RNA
ggcagtgatggcatggactgtgggcatgagtgcttgcccga

SEQ ID NO: 9245 - RNA, 41 nt, synthetic construct
  source 1..41: mol_type = other RNA
ggactgtggtcatgagtgctcgcccgaacccaaagttgtca

SEQ ID NO: 9246 - RNA, 41 nt, synthetic construct
  source 1..41: mol_type = other RNA
agtgctcgcccgaaccccaagttgtcatggatgaccttggc

SEQ ID NO: 9247 - RNA, 41 nt, synthetic construct
  source 1..41: mol_type = other RNA
agtactcgcacggtaacattgttgtcatggatgaccttggc

SEQ ID NO: 9248 - RNA, 41 nt, synthetic construct
  source 1..41: mol_type = other RNA
aatcctcccccgttaccagacttgtcatggatgaccttggc

SEQ ID NO: 9249 - RNA, 41 nt, synthetic construct
  source 1..41: mol_type = other RNA
ggcagtgatggcatggactgtgacaatgcgtccctccacgc

SEQ ID NO: 9250 - RNA, 41 nt, synthetic construct
  source 1..41: mol_type = other RNA
ggcagtgatggcatggactgtgctaatgagtactcccccgc

SEQ ID NO: 9251 - RNA, 41 nt, synthetic construct
  source 1..41: mol_type = other RNA
agtccttccacgctatcagcgttgtcatggatgaccttggc

SEQ ID NO: 9252 - RNA, 41 nt, synthetic construct
  source 1..41: mol_type = other RNA
agtccttccacgataccacagttgtcatggatgaccttggc

SEQ ID NO: 9253 - RNA, 41 nt, synthetic construct
  source 1..41: mol_type = other RNA
ggactgtggtcatgagtcattccacgttaccaaagttgtca

SEQ ID NO: 9254 - RNA, 41 nt, synthetic construct
  source 1..41: mol_type = other RNA
ggactgtggtcatgagtcatcccacgataccaaagttgtca

SEQ ID NO: 9255 - RNA, 41 nt, synthetic construct
  source 1..41: mol_type = other RNA
ggcagtgatggcatggactgtgaccatgagtcatcccacga

SEQ ID NO: 9256 - RNA, 41 nt, synthetic construct
  source 1..41: mol_type = other RNA
ggactgtggtcatgagtgcccccacgataccaaagttgtca

SEQ ID NO: 9257 - RNA, 41 nt, synthetic construct
  source 1..41: mol_type = other RNA
ggactgtggtcatgagtcgtcccacggtaccaaagttgtca

SEQ ID NO: 9258 - RNA, 41 nt, synthetic construct
  source 1..41: mol_type = other RNA
agtcctcccacactatcacagttgtcatggatgaccttggc

SEQ ID NO: 9259 - RNA, 41 nt, synthetic construct
  source 1..41: mol_type = other RNA
agccctcccatgataccaaagttgtcatggatgaccttggc

SEQ ID NO: 9260 - RNA, 40 nt, synthetic construct
  source 1..40: mol_type = other RNA
agcgtcccacggtaccaaagttgtcatggatgaccttggc

SEQ ID NO: 9261 - RNA, 40 nt, synthetic construct
  source 1..40: mol_type = other RNA
agcgttccacggtaccaaagttgtcatggatgaccttggc

SEQ ID NO: 9262 - RNA, 40 nt, synthetic construct
  source 1..40: mol_type = other RNA
ggactgtggtcatgagcgtcccacggtaccaaagttgtca

SEQ ID NO: 9263 - RNA, 41 nt, synthetic construct
  source 1..41: mol_type = other RNA
ggcagtgatggcatggactgtggtcatgagtcctcccagga

SEQ ID NO: 9264 - RNA, 41 nt, synthetic construct
  source 1..41: mol_type = other RNA
ggcagtgatggcatggactgtggtcatgagtactcccacga

SEQ ID NO: 9265 - RNA, 41 nt, synthetic construct
  source 1..41: mol_type = other RNA
agtcctcgcccgctaccaaggttgtcatggatgaccttggc

SEQ ID NO: 9266 - RNA, 41 nt, synthetic construct
  source 1..41: mol_type = other RNA
agtccttgcccgctaccaaggttgtcatggatgaccttggc

SEQ ID NO: 9267 - RNA, 41 nt, synthetic construct
  source 1..41: mol_type = other RNA
ggactgtggtcacgagtcctcgcccgctaccaaagttgtca

SEQ ID NO: 9268 - RNA, 41 nt, synthetic construct
  source 1..41: mol_type = other RNA
agtccttccacgctaccacagttgtcatggatgaccttggc

SEQ ID NO: 9269 - RNA, 41 nt, synthetic construct
  source 1..41: mol_type = other RNA
ggactgtggtcatgagtccttccacactaccaaagttgtca

SEQ ID NO: 9270 - RNA, 41 nt, synthetic construct
  source 1..41: mol_type = other RNA
agtcctcccacactaccaaagttgtcatggatgaccttggc

SEQ ID NO: 9271 - RNA, 41 nt, synthetic construct
  source 1..41: mol_type = other RNA
agtccttccacactaccaaagttgtcatggatgaccttggc

SEQ ID NO: 9272 - RNA, 41 nt, synthetic construct
  source 1..41: mol_type = other RNA
ggactgtggtcatgcgtcctcccgcgctaccaaagttgtca

SEQ ID NO: 9273 - RNA, 41 nt, synthetic construct
  source 1..41: mol_type = other RNA
agcccttccacgataccaaagttgtcatggatgaccttggc

SEQ ID NO: 9274 - RNA, 40 nt, synthetic construct
  source 1..40: mol_type = other RNA
ggactgtggtcgtgagacctcaacccgaccaaagttgtca

SEQ ID NO: 9275 - RNA, 41 nt, synthetic construct
  source 1..41: mol_type = other RNA
ggcagtgatggcatggactgtgttcatgagtccttccacgc

SEQ ID NO: 9276 - RNA, 41 nt, synthetic construct
  source 1..41: mol_type = other RNA
ggactgtggtcatgagtcctcccacgctatcaaagttgtca

SEQ ID NO: 9277 - RNA, 41 nt, synthetic construct
  source 1..41: mol_type = other RNA
ggcagtgatggcatggactgtggtcatgagacctcccacca

SEQ ID NO: 9278 - RNA, 41 nt, synthetic construct
  source 1..41: mol_type = other RNA
agatctcccaccataccaaggttgtcatggatgaccttggc

SEQ ID NO: 9279 - RNA, 41 nt, synthetic construct
  source 1..41: mol_type = other RNA
agtccttccacaataccaacgttgtcatggatgaccttggc

SEQ ID NO: 9280 - RNA, 41 nt, synthetic construct
  source 1..41: mol_type = other RNA
cgtcctccctcgttaccaaagttgtcatggatgaccttggc

SEQ ID NO: 9281 - RNA, 36 nt, synthetic construct
  source 1..36: mol_type = other RNA
ggcagtgatggcatggactgtggtcaagatccacgc

SEQ ID NO: 9282 - RNA, 36 nt, synthetic construct
  source 1..36: mol_type = other RNA
ggactgtggtcaagacccacgcgcaaaaagttgtca

SEQ ID NO: 9283 - RNA, 36 nt, synthetic construct
  source 1..36: mol_type = other RNA
ggactgtggtcaagatccacgcgcaaaaagttgtca

SEQ ID NO: 9284 - RNA, 41 nt, synthetic construct
  source 1..41: mol_type = other RNA
ggcagtgatggcatggactgtgcctatgagtccctcgacgt

SEQ ID NO: 9285 - RNA, 40 nt, synthetic construct
  source 1..40: mol_type = other RNA
ggcagtgatggcatggactgggtcatgagtcctcacacga

SEQ ID NO: 9286 - RNA, 41 nt, synthetic construct
  source 1..41: mol_type = other RNA
agtcatcccacggtaccaaagttgtcatggatgaccttggc

SEQ ID NO: 9287 - RNA, 41 nt, synthetic construct
  source 1..41: mol_type = other RNA
ggcagtgatggcatggactgtgttcatgagtccttccgcga

SEQ ID NO: 9288 - RNA, 41 nt, synthetic construct
  source 1..41: mol_type = other RNA
aggccccccacgataactaaattgtcatggatgaccttggc

SEQ ID NO: 9289 - RNA, 41 nt, synthetic construct
  source 1..41: mol_type = other RNA
aggccctccacgataactaaattgtcatggatgaccttggc

SEQ ID NO: 9290 - RNA, 41 nt, synthetic construct
  source 1..41: mol_type = other RNA
ggcagtgatggcatggactgtggtaatgagtcctcccccga

SEQ ID NO: 9291 - RNA, 41 nt, synthetic construct
  source 1..41: mol_type = other RNA
agtcctcccccgatatcaaggttgtcatggatgaccttggc

SEQ ID NO: 9292 - RNA, 41 nt, synthetic construct
  source 1..41: mol_type = other RNA
aggcctcccacggtaccaaagttgtcatggatgaccttggc

SEQ ID NO: 9293 - RNA, 42 nt, synthetic construct
  source 1..42: mol_type = other RNA
ggactgtggttataagtacttcccagatatctaaagttgtca

SEQ ID NO: 9294 - RNA, 41 nt, synthetic construct
  source 1..41: mol_type = other RNA
agtacttcccagatatctgccttgtcatggatgaccttggc

SEQ ID NO: 9295 - RNA, 41 nt, synthetic construct
  source 1..41: mol_type = other RNA
agtactccccagatatctgccttgtcatggatgaccttggc

SEQ ID NO: 9296 - RNA, 41 nt, synthetic construct
  source 1..41: mol_type = other RNA
ggcagtgatggcatggactgtgatcatgagtcctcccacga

SEQ ID NO: 9297 - RNA, 41 nt, synthetic construct
  source 1..41: mol_type = other RNA
agtcctcccacgatacaaatgttgtcatggatgaccttggc

SEQ ID NO: 9298 - RNA, 41 nt, synthetic construct
  source 1..41: mol_type = other RNA
ggactgtggtcatgagtcctcccacgatacaaaagttgtca

SEQ ID NO: 9299 - RNA, 41 nt, synthetic construct
  source 1..41: mol_type = other RNA
ggcagtgatggcatggactgtggtcatgagtccttccacga

SEQ ID NO: 9300 - RNA, 41 nt, synthetic construct
  source 1..41: mol_type = other RNA
ggactgtggttatgagtccttccacggtaccaaagttgtca

SEQ ID NO: 9301 - RNA, 41 nt, synthetic construct
  source 1..41: mol_type = other RNA
ggactgtggtcatgagtccttccccgttaccaaagttgtca

SEQ ID NO: 9302 - RNA, 43 nt, synthetic construct
  source 1..43: mol_type = other RNA
ggactgtggtcatgagtccccccacactaccccaaagttgtca

SEQ ID NO: 9303 - RNA, 42 nt, synthetic construct
  source 1..42: mol_type = other RNA
agtccccccacactaccccaacttgtcatggatgaccttggc

SEQ ID NO: 9304 - RNA, 41 nt, synthetic construct
  source 1..41: mol_type = other RNA
ggcagtgatggcatggactgtggtcatgcgtcctcccacga

SEQ ID NO: 9305 - RNA, 41 nt, synthetic construct
  source 1..41: mol_type = other RNA
ggactgtggtcatgcgtccttccacgatactaaagttgtca

SEQ ID NO: 9306 - RNA, 41 nt, synthetic construct
  source 1..41: mol_type = other RNA
ggcagtgatggcatggactgtggtcatgcgtccttccacga

SEQ ID NO: 9307 - RNA, 41 nt, synthetic construct
  source 1..41: mol_type = other RNA
cgtcctcccacgatactaatgttgtcatggatgaccttggc

SEQ ID NO: 9308 - RNA, 40 nt, synthetic construct
  source 1..40: mol_type = other RNA
gtccccccacgatagcaaaattgtcatggatgaccttggc

SEQ ID NO: 9309 - RNA, 41 nt, synthetic construct
  source 1..41: mol_type = other RNA
ggcagtgatggcatggactgtgatcttgagtcctcccacga

SEQ ID NO: 9310 - RNA, 41 nt, synthetic construct
  source 1..41: mol_type = other RNA
ggcagtgatggcatggactgtggtactgagtcctccctcgt

SEQ ID NO: 9311 - RNA, 41 nt, synthetic construct
  source 1..41: mol_type = other RNA
ggcagtgatggcatggactgtggtactgagtccttcctcgt

SEQ ID NO: 9312 - RNA, 41 nt, synthetic construct
  source 1..41: mol_type = other RNA
agtcctccctcgttaccagagttgtcatggatgaccttggc

SEQ ID NO: 9313 - RNA, 41 nt, synthetic construct
  source 1..41: mol_type = other RNA
ggactgtggtactgagtccttcctcgttaccaaagttgtca

SEQ ID NO: 9314 - RNA, 41 nt, synthetic construct
  source 1..41: mol_type = other RNA
ggcagtgatggcatggactgtgaccatgagtccacccacga

SEQ ID NO: 9315 - RNA, 41 nt, synthetic construct
  source 1..41: mol_type = other RNA
agcccatccgtgatagcaatgttgtcatggatgaccttggc

SEQ ID NO: 9316 - RNA, 41 nt, synthetic construct
  source 1..41: mol_type = other RNA
ggactgtggttctgagcccatccgtgatagcaaagttgtca

SEQ ID NO: 9317 - RNA, 41 nt, synthetic construct
  source 1..41: mol_type = other RNA
agtccccccacagaacaaaaattgtcatggatgaccttggc

SEQ ID NO: 9318 - RNA, 41 nt, synthetic construct
  source 1..41: mol_type = other RNA
agtccctccacagaacaaaaattgtcatggatgaccttggc

SEQ ID NO: 9319 - RNA, 40 nt, synthetic construct
  source 1..40: mol_type = other RNA
agccttccccgttactaaagttgtcatggatgaccttggc

SEQ ID NO: 9320 - RNA, 41 nt, synthetic construct
  source 1..41: mol_type = other RNA
ggactgtggtcgccgagcctcccccgttactaaagttgtca

SEQ ID NO: 9321 - RNA, 40 nt, synthetic construct
  source 1..40: mol_type = other RNA
ggactgtggttatgagcccttcctgataccaaagttgtca

SEQ ID NO: 9322 - RNA, 40 nt, synthetic construct
  source 1..40: mol_type = other RNA
ggcagtgatggcatggactgtggctatgagccctccctga

SEQ ID NO: 9323 - RNA, 40 nt, synthetic construct
  source 1..40: mol_type = other RNA
ggactgtggttatgagccctccctgataccaaagttgtca

SEQ ID NO: 9324 - RNA, 41 nt, synthetic construct
  source 1..41: mol_type = other RNA
ggcagtgatggcatggactgtggtcatgagccatcccccgt

SEQ ID NO: 9325 - RNA, 41 nt, synthetic construct
  source 1..41: mol_type = other RNA
ggcagtgatggcatggactgtggtcatgagtccttgcccga

SEQ ID NO: 9326 - RNA, 41 nt, synthetic construct
  source 1..41: mol_type = other RNA
agtccatccatgataccaaagttgtcatggatgaccttggc

SEQ ID NO: 9327 - RNA, 41 nt, synthetic construct
  source 1..41: mol_type = other RNA
ggactgtggtcacgagtccttccacggtaccaaagttgtca

SEQ ID NO: 9328 - RNA, 41 nt, synthetic construct
  source 1..41: mol_type = other RNA
ggcagtgatggcatggactgtggtcacgagtccttccacgg

SEQ ID NO: 9329 - RNA, 41 nt, synthetic construct
  source 1..41: mol_type = other RNA
ggcagtgatggcatggactgtagtcatgaatcctcccacga

SEQ ID NO: 9330 - RNA, 41 nt, synthetic construct
  source 1..41: mol_type = other RNA
ggcagtgatggcatggactgcggtacatgagtccctcccga

SEQ ID NO: 9331 - RNA, 41 nt, synthetic construct
  source 1..41: mol_type = other RNA
agtccctgcacggtaccaaagttgtcatggatgaccttggc

SEQ ID NO: 9332 - RNA, 41 nt, synthetic construct
  source 1..41: mol_type = other RNA
ggcagtgatggcatggactgtggtcttgagtccttccacgg

SEQ ID NO: 9333 - RNA, 41 nt, synthetic construct
  source 1..41: mol_type = other RNA
ggtccttccacgataccaacgttgtcatggatgaccttggc

SEQ ID NO: 9334 - RNA, 42 nt, synthetic construct
  source 1..42: mol_type = other RNA
agtcgtctcacgatacctaaagttgtcatggatgaccttggc

SEQ ID NO: 9335 - RNA, 41 nt, synthetic construct
  source 1..41: mol_type = other RNA
agccctcccacgctaccagagttgtcatggatgaccttggc

SEQ ID NO: 9336 - RNA, 41 nt, synthetic construct
  source 1..41: mol_type = other RNA
agcccttccacgctaccagagttgtcatggatgaccttggc

SEQ ID NO: 9337 - RNA, 41 nt, synthetic construct
  source 1..41: mol_type = other RNA
ggactgtggtcatgagcccttccaccataccaaagttgtca

SEQ ID NO: 9338 - RNA, 41 nt, synthetic construct
  source 1..41: mol_type = other RNA
agccctcccaccataccaacgttgtcatggatgaccttggc

SEQ ID NO: 9339 - RNA, 41 nt, synthetic construct
  source 1..41: mol_type = other RNA
ggcagtgatggcatggactgtggtcatgagtacttccaagg

SEQ ID NO: 9340 - RNA, 41 nt, synthetic construct
  source 1..41: mol_type = other RNA
agtacttccaaggtaacgaagttgtcatggatgaccttggc

SEQ ID NO: 9341 - RNA, 43 nt, synthetic construct
  source 1..43: mol_type = other RNA
agtcctcccacgaacagccaaagttgtcatggatgaccttggc

SEQ ID NO: 9342 - RNA, 41 nt, synthetic construct
  source 1..41: mol_type = other RNA
ggcagtgatggcatggactgtggtaatgagtactcccacac

SEQ ID NO: 9343 - RNA, 41 nt, synthetic construct
  source 1..41: mol_type = other RNA
ggactgtggtaatgagtacttccacactacgaaagttgtca

SEQ ID NO: 9344 - RNA, 41 nt, synthetic construct
  source 1..41: mol_type = other RNA
ggcagtgatggcatggactgtggccatgagccctcccccgt

SEQ ID NO: 9345 - RNA, 41 nt, synthetic construct
  source 1..41: mol_type = other RNA
ggactgtggtcatgagccctcccccgttacgaaagttgtca

SEQ ID NO: 9346 - RNA, 41 nt, synthetic construct
  source 1..41: mol_type = other RNA
agtcctcgcacgttaccaacgttgtcatggatgaccttggc

SEQ ID NO: 9347 - RNA, 41 nt, synthetic construct
  source 1..41: mol_type = other RNA
ggactgtggtcgtgagtactgcgacaatcccaaagttgtca

SEQ ID NO: 9348 - RNA, 41 nt, synthetic construct
  source 1..41: mol_type = other RNA
ggcagtgatggcatggactgtagtcatgagtcctcccacgc

SEQ ID NO: 9349 - RNA, 41 nt, synthetic construct
  source 1..41: mol_type = other RNA
ggactgtggtagtgcgtccccccacgctaacaaagttgtca

SEQ ID NO: 9350 - RNA, 41 nt, synthetic construct
  source 1..41: mol_type = other RNA
cgtccctccacgctaacaaaattgtcatggatgaccttggc

SEQ ID NO: 9351 - RNA, 41 nt, synthetic construct
  source 1..41: mol_type = other RNA
ggactgtggtaatgagtccttccacgctatcaaagttgtca

SEQ ID NO: 9352 - RNA, 41 nt, synthetic construct
  source 1..41: mol_type = other RNA
ggcagtgatggcatggactgtggttaggcgcccctgcacgg

SEQ ID NO: 9353 - RNA, 45 nt, synthetic construct
  source 1..45: mol_type = other RNA
ggactgtggttaggcgcccctgtacgggagtgaccaaagttgtca

SEQ ID NO: 9354 - RNA, 44 nt, synthetic construct
  source 1..44: mol_type = other RNA
cgcccccgtacgggagtgaccaacttgtcatggatgaccttggc

SEQ ID NO: 9355 - RNA, 41 nt, synthetic construct
  source 1..41: mol_type = other RNA
ggactgtggttatgagtccctccaccgtaacaaagttgtca

SEQ ID NO: 9356 - RNA, 41 nt, synthetic construct
  source 1..41: mol_type = other RNA
agtactgccgcgataacaaagttgtcatggatgaccttggc

SEQ ID NO: 9357 - RNA, 41 nt, synthetic construct
  source 1..41: mol_type = other RNA
ggcagtgatggcatggactggggtcatgagtactcccgcga

SEQ ID NO: 9358 - RNA, 41 nt, synthetic construct
  source 1..41: mol_type = other RNA
ggcagtgatggcatggactggggtcatgagtactgccgcga

SEQ ID NO: 9359 - RNA, 41 nt, synthetic construct
  source 1..41: mol_type = other RNA
agtccttccacaataccaaagttgtcatggatgaccttggc

SEQ ID NO: 9360 - RNA, 41 nt, synthetic construct
  source 1..41: mol_type = other RNA
ggcagtgatggcatggactgtgatcaagcgtccctccccac

SEQ ID NO: 9361 - RNA, 41 nt, synthetic construct
  source 1..41: mol_type = other RNA
agccctctcacgatcccaaagttgtcatggatgaccttggc

SEQ ID NO: 9362 - RNA, 41 nt, synthetic construct
  source 1..41: mol_type = other RNA
ggcagtgatggcatggactgtgaccaggagtcgccccacca

SEQ ID NO: 9363 - RNA, 40 nt, synthetic construct
  source 1..40: mol_type = other RNA
gtccccccacgataccaaagttgtcatggatgaccttggc

SEQ ID NO: 9364 - RNA, 41 nt, synthetic construct
  source 1..41: mol_type = other RNA
ggcagtgatggcatggactgtggcgatgaacccttccacgg

SEQ ID NO: 9365 - RNA, 41 nt, synthetic construct
  source 1..41: mol_type = other RNA
ggactgtggtaatgagcccctccaccataagaaagttgtca

SEQ ID NO: 9366 - RNA, 41 nt, synthetic construct
  source 1..41: mol_type = other RNA
ggactgtggtaatgagtgcccccacgatagcaaagttgtca

SEQ ID NO: 9367 - RNA, 41 nt, synthetic construct
  source 1..41: mol_type = other RNA
agtgcccccacgatagcaacattgtcatggatgaccttggc

SEQ ID NO: 9368 - RNA, 41 nt, synthetic construct
  source 1..41: mol_type = other RNA
agtacccgcacactaacaaaattgtcatggatgaccttggc

SEQ ID NO: 9369 - RNA, 40 nt, synthetic construct
  source 1..40: mol_type = other RNA
ggactgtggtatgagtacctgcacactaacaaagttgtca

SEQ ID NO: 9370 - RNA, 41 nt, synthetic construct
  source 1..41: mol_type = other RNA
ggcagtgatggcatggactgtgtacatgagtccctccacgc

SEQ ID NO: 9371 - RNA, 41 nt, synthetic construct
  source 1..41: mol_type = other RNA
ggactgtggtcatgagtccccccacgctaataaagttgtca

SEQ ID NO: 9372 - RNA, 41 nt, synthetic construct
  source 1..41: mol_type = other RNA
agtccccccacgctaataaagttgtcatggatgaccttggc

SEQ ID NO: 9373 - RNA, 41 nt, synthetic construct
  source 1..41: mol_type = other RNA
ggcagtgatggcatggactgtgggcatgagtgctcgcccga

SEQ ID NO: 9374 - RNA, 41 nt, synthetic construct
  source 1..41: mol_type = other RNA
agtgcttgcccgaaccccaagttgtcatggatgaccttggc

SEQ ID NO: 9375 - RNA, 41 nt, synthetic construct
  source 1..41: mol_type = other RNA
agtacttgcacggtaacattgttgtcatggatgaccttggc

SEQ ID NO: 9376 - RNA, 41 nt, synthetic construct
  source 1..41: mol_type = other RNA
ggactgtggtcaagaatccttccccgttaccaaagttgtca

SEQ ID NO: 9377 - RNA, 41 nt, synthetic construct
  source 1..41: mol_type = other RNA
ggcagtgatggcatggactgtagtcaagaatcctcccccgt

SEQ ID NO: 9378 - RNA, 41 nt, synthetic construct
  source 1..41: mol_type = other RNA
agtcctcccatgataagaaggttgtcatggatgaccttggc

SEQ ID NO: 9379 - RNA, 41 nt, synthetic construct
  source 1..41: mol_type = other RNA
agtccttccatgataagaaggttgtcatggatgaccttggc

SEQ ID NO: 9380 - RNA, 41 nt, synthetic construct
  source 1..41: mol_type = other RNA
agtactcccccgctaccaaaattgtcatggatgaccttggc

SEQ ID NO: 9381 - RNA, 41 nt, synthetic construct
  source 1..41: mol_type = other RNA
agtcctcccacgctatcagcgttgtcatggatgaccttggc

SEQ ID NO: 9382 - RNA, 41 nt, synthetic construct
  source 1..41: mol_type = other RNA
agtcattccacgttaccaacgttgtcatggatgaccttggc

SEQ ID NO: 9383 - RNA, 41 nt, synthetic construct
  source 1..41: mol_type = other RNA
ggtcctcccacgataccagagttgtcatggatgaccttggc

SEQ ID NO: 9384 - RNA, 41 nt, synthetic construct
  source 1..41: mol_type = other RNA
agtcttcccacggtgccaaagttgtcatggatgaccttggc

SEQ ID NO: 9385 - RNA, 41 nt, synthetic construct
  source 1..41: mol_type = other RNA
agtacttccccgttaccaaagttgtcatggatgaccttggc

SEQ ID NO: 9386 - RNA, 41 nt, synthetic construct
  source 1..41: mol_type = other RNA
ggcagtgatggcatggactgtggtcatgagtacttccccgt

SEQ ID NO: 9387 - RNA, 41 nt, synthetic construct
  source 1..41: mol_type = other RNA
agtactcccccgttaccaaagttgtcatggatgaccttggc

SEQ ID NO: 9388 - RNA, 41 nt, synthetic construct
  source 1..41: mol_type = other RNA
ggcagtgatggcatggactgtggtcataagcccttccacga

SEQ ID NO: 9389 - RNA, 41 nt, synthetic construct
  source 1..41: mol_type = other RNA
agcccttccatgataccaaagttgtcatggatgaccttggc

SEQ ID NO: 9390 - RNA, 41 nt, synthetic construct
  source 1..41: mol_type = other RNA
ggactgtggtcatgagtacttccacgataccaaagttgtca

SEQ ID NO: 9391 - RNA, 41 nt, synthetic construct
  source 1..41: mol_type = other RNA
agtactcccacgataccaaagttgtcatggatgaccttggc

SEQ ID NO: 9392 - RNA, 41 nt, synthetic construct
  source 1..41: mol_type = other RNA
actctcccaccctacctaaagttgtcatggatgaccttggc

SEQ ID NO: 9393 - RNA, 41 nt, synthetic construct
  source 1..41: mol_type = other RNA
agtcctcccacgatatcaaagttgtcatggatgaccttggc

SEQ ID NO: 9394 - RNA, 41 nt, synthetic construct
  source 1..41: mol_type = other RNA
ggactgtggtcatgagtccttccacgctaccaaagttgtca

SEQ ID NO: 9395 - RNA, 41 nt, synthetic construct
  source 1..41: mol_type = other RNA
ggcagtgatggcatggactgtggtcatgcgtccttccgcgc

SEQ ID NO: 9396 - RNA, 42 nt, synthetic construct
  source 1..42: mol_type = other RNA
ggactgtggtcgtgagtacctccacgataactaaagttgtca

SEQ ID NO: 9397 - RNA, 42 nt, synthetic construct
  source 1..42: mol_type = other RNA
agtacccccacgataactaaagttgtcatggatgaccttggc

SEQ ID NO: 9398 - RNA, 41 nt, synthetic construct
  source 1..41: mol_type = other RNA
agtcctcccacgataacgtagttgtcatggatgaccttggc

SEQ ID NO: 9399 - RNA, 40 nt, synthetic construct
  source 1..40: mol_type = other RNA
agacctcaacccgaccaaagttgtcatggatgaccttggc

SEQ ID NO: 9400 - RNA, 41 nt, synthetic construct
  source 1..41: mol_type = other RNA
ggactgtggtcatgagatcttccaccataccaaagttgtca

SEQ ID NO: 9401 - RNA, 41 nt, synthetic construct
  source 1..41: mol_type = other RNA
ggcagtgatggcatggactgtggtcaagcgtccttcctcgt

SEQ ID NO: 9402 - RNA, 41 nt, synthetic construct
  source 1..41: mol_type = other RNA
agtccttgcacaataccaaagttgtcatggatgaccttggc

SEQ ID NO: 9403 - RNA, 36 nt, synthetic construct
  source 1..36: mol_type = other RNA
ggcagtgatggcatggactgtggtcaagacccacgc

SEQ ID NO: 9404 - RNA, 39 nt, synthetic construct
  source 1..39: mol_type = other RNA
agtcctcacacgataccggttgtcatggatgaccttggc

SEQ ID NO: 9405 - RNA, 41 nt, synthetic construct
  source 1..41: mol_type = other RNA
agtcattccacggtaccaaagttgtcatggatgaccttggc

SEQ ID NO: 9406 - RNA, 40 nt, synthetic construct
  source 1..40: mol_type = other RNA
ggcagtgatggcatggactgtggtcatgagccttccccgc

SEQ ID NO: 9407 - RNA, 40 nt, synthetic construct
  source 1..40: mol_type = other RNA
ggactgtggtcatgagccttccccgctaccaaagttgtca

SEQ ID NO: 9408 - RNA, 41 nt, synthetic construct
  source 1..41: mol_type = other RNA
agtcctcccgcgatatcaaagttgtcatggatgaccttggc

SEQ ID NO: 9409 - RNA, 41 nt, synthetic construct
  source 1..41: mol_type = other RNA
agtccttccgcgatatcaaagttgtcatggatgaccttggc

SEQ ID NO: 9410 - RNA, 41 nt, synthetic construct
  source 1..41: mol_type = other RNA
ggactgtggtcgtgagtccttccgcgatatcaaagttgtca

SEQ ID NO: 9411 - RNA, 41 nt, synthetic construct
  source 1..41: mol_type = other RNA
ggcagtgatggcatggactgtggtaatgagtccttccccga

SEQ ID NO: 9412 - RNA, 41 nt, synthetic construct
  source 1..41: mol_type = other RNA
ggcagtgatggcatggactgtggtcataagtcctcgccaga

SEQ ID NO: 9413 - RNA, 41 nt, synthetic construct
  source 1..41: mol_type = other RNA
aggccttccacggtaccaaagttgtcatggatgaccttggc

SEQ ID NO: 9414 - RNA, 41 nt, synthetic construct
  source 1..41: mol_type = other RNA
agtcctcccacggtaccaaagttgtcatggatgaccttggc

SEQ ID NO: 9415 - RNA, 41 nt, synthetic construct
  source 1..41: mol_type = other RNA
ggcagtgatggcatggactgtggtcatgagtccccccacac

SEQ ID NO: 9416 - RNA, 41 nt, synthetic construct
  source 1..41: mol_type = other RNA
ggcagtgatggcatggactgtgaccatgagtccatccacga

SEQ ID NO: 9417 - RNA, 41 nt, synthetic construct
  source 1..41: mol_type = other RNA
ggactgtggtcatgggtccatccacgataccaaagttgtca

SEQ ID NO: 9418 - RNA, 42 nt, synthetic construct
  source 1..42: mol_type = other RNA
ggcagtgatggcatggactgtggttatgagtccccccacaga

SEQ ID NO: 9419 - RNA, 41 nt, synthetic construct
  source 1..41: mol_type = other RNA
ggactgtggtcatgagtcctcccgtgataccaaagttgtca

SEQ ID NO: 9420 - RNA, 41 nt, synthetic construct
  source 1..41: mol_type = other RNA
agactttccacgatactaaagttgtcatggatgaccttggc

SEQ ID NO: 9421 - RNA, 41 nt, synthetic construct
  source 1..41: mol_type = other RNA
ggcagtgatggcatggactgtggtcatgagccattccccgt

SEQ ID NO: 9422 - RNA, 41 nt, synthetic construct
  source 1..41: mol_type = other RNA
aatctttccacgatgccagagttgtcatggatgaccttggc

SEQ ID NO: 9423 - RNA, 41 nt, synthetic construct
  source 1..41: mol_type = other RNA
agtccctcccgattaccaaagttgtcatggatgaccttggc

SEQ ID NO: 9424 - RNA, 41 nt, synthetic construct
  source 1..41: mol_type = other RNA
ggactgtggtcttgagtccttccacggtaccaaagttgtca

SEQ ID NO: 9425 - RNA, 41 nt, synthetic construct
  source 1..41: mol_type = other RNA
agtccttccacggtaccacagttgtcatggatgaccttggc

SEQ ID NO: 9426 - RNA, 40 nt, synthetic construct
  source 1..40: mol_type = other RNA
agtacccccacgatgccaagttgtcatggatgaccttggc

SEQ ID NO: 9427 - RNA, 40 nt, synthetic construct
  source 1..40: mol_type = other RNA
agtacctccacgatgccaagttgtcatggatgaccttggc

SEQ ID NO: 9428 - RNA, 44 nt, synthetic construct
  source 1..44: mol_type = other RNA
ggcagtgatggcatggactgtgttttgttatgagaattcgacgc

SEQ ID NO: 9429 - RNA, 44 nt, synthetic construct
  source 1..44: mol_type = other RNA
ggcagtgatggcatggactgtgttttgttatgagaatccgacgc

SEQ ID NO: 9430 - RNA, 41 nt, synthetic construct
  source 1..41: mol_type = other RNA
ggcagtgatggcatggactggggtcataagtccttccacgg

SEQ ID NO: 9431 - RNA, 41 nt, synthetic construct
  source 1..41: mol_type = other RNA
agtcatcccacgataccaaagttgtcatggatgaccttggc

SEQ ID NO: 9432 - RNA, 41 nt, synthetic construct
  source 1..41: mol_type = other RNA
ggcagtgatggcatggactgtggtcatgagtccttccacgg

SEQ ID NO: 9433 - RNA, 41 nt, synthetic construct
  source 1..41: mol_type = other RNA
ggcagtgatggcatggactgtggtcatgagtcctcccacgg

SEQ ID NO: 9434 - RNA, 41 nt, synthetic construct
  source 1..41: mol_type = other RNA
ggcagtgatggcatggactgtggtaatgagtccttccacac

SEQ ID NO: 9435 - RNA, 41 nt, synthetic construct
  source 1..41: mol_type = other RNA
ggcagtgatggcatggactgtggtcataagccctcccacga

SEQ ID NO: 9436 - RNA, 40 nt, synthetic construct
  source 1..40: mol_type = other RNA
ggcagtgatggcatggactgtggtcatgactctcccaccc

SEQ ID NO: 9437 - RNA, 41 nt, synthetic construct
  source 1..41: mol_type = other RNA
agtccccacatgatactaaagttgtcatggatgaccttggc

SEQ ID NO: 9438 - RNA, 41 nt, synthetic construct
  source 1..41: mol_type = other RNA
ggcagtgatggcatggactgtgctcatgagtacccccacga

SEQ ID NO: 9439 - RNA, 41 nt, synthetic construct
  source 1..41: mol_type = other RNA
ggcagtgatggcatggactgtggtcatgagtcctcccacaa

SEQ ID NO: 9440 - RNA, 41 nt, synthetic construct
  source 1..41: mol_type = other RNA
cgtccttcctcgttaccaaagttgtcatggatgaccttggc

SEQ ID NO: 9441 - RNA, 42 nt, synthetic construct
  source 1..42: mol_type = other RNA
ggcagtgatggcatggactgtggttatgagtccctccacaga

SEQ ID NO: 9442 - RNA, 40 nt, synthetic construct
  source 1..40: mol_type = other RNA
ggcagtgatggcatggactgtggctatgagcccttcctga

SEQ ID NO: 9443 - RNA, 41 nt, synthetic construct
  source 1..41: mol_type = other RNA
agtccccgcacggtaccaaagttgtcatggatgaccttggc

SEQ ID NO: 9444 - RNA, 41 nt, synthetic construct
  source 1..41: mol_type = other RNA
ggcagtgatggcatggactgtggcaatgcgtccctccacgc

SEQ ID NO: 9445 - RNA, 41 nt, synthetic construct
  source 1..41: mol_type = other RNA
ggactgtggtcatgggtccttccacgataccaaagttgtca

SEQ ID NO: 9446 - RNA, 41 nt, synthetic construct
  source 1..41: mol_type = other RNA
ggactgtggtaatgagtccttccacgatatcaaagttgtca

SEQ ID NO: 9447 - RNA, 41 nt, synthetic construct
  source 1..41: mol_type = other RNA
ggcagtgatggcatggactgtggtcatgagtccttccccgt

SEQ ID NO: 9448 - RNA, 41 nt, synthetic construct
  source 1..41: mol_type = other RNA
ggactgtggtcttgagtccttccacgataccaaagttgtca

SEQ ID NO: 9449 - RNA, 41 nt, synthetic construct
  source 1..41: mol_type = other RNA
agtccttccacggtaccaacgttgtcatggatgaccttggc

SEQ ID NO: 9450 - RNA, 41 nt, synthetic construct
  source 1..41: mol_type = other RNA
acggaaggccatgccagtgagctacccgtggctcagggaag

SEQ ID NO: 9451 - RNA, 41 nt, synthetic construct
  source 1..41: mol_type = other RNA
acggaaggccatgccagtgagcttcccattaagcccaagga

SEQ ID NO: 9452 - RNA, 41 nt, synthetic construct
  source 1..41: mol_type = other RNA
cagtgagcttcccgtttcgttcaggggtgaccttgcccaca

SEQ ID NO: 9453 - RNA, 41 nt, synthetic construct
  source 1..41: mol_type = other RNA
acggaaggccatgccagtgagcttcccattcagcccaggga

SEQ ID NO: 9454 - RNA, 41 nt, synthetic construct
  source 1..41: mol_type = other RNA
cagtgagcttaacggttagctcagggatgaccttgcccaca

SEQ ID NO: 9455 - RNA, 40 nt, synthetic construct
  source 1..40: mol_type = other RNA
acggaaggccatgccagtgagcttccgttcagcccaggga

SEQ ID NO: 9456 - RNA, 42 nt, synthetic construct
  source 1..42: mol_type = other RNA
acggaaggccatgccagtgagctgagcgttcgggttcaagga

SEQ ID NO: 9457 - RNA, 41 nt, synthetic construct
  source 1..41: mol_type = other RNA
acggaaggccatgccagtgagcttcacgttcagctcagaga

SEQ ID NO: 9458 - RNA, 41 nt, synthetic construct
  source 1..41: mol_type = other RNA
cagtgagcttttcgttcagctcagcgatgaccttgcccaca

SEQ ID NO: 9459 - RNA, 41 nt, synthetic construct
  source 1..41: mol_type = other RNA
acggaaggccatgccagtgagcttcccgttcagttcaggga

SEQ ID NO: 9460 - RNA, 41 nt, synthetic construct
  source 1..41: mol_type = other RNA
cagtgagcttcccgtttgacccaggaatgaccttgcccaca

SEQ ID NO: 9461 - RNA, 41 nt, synthetic construct
  source 1..41: mol_type = other RNA
acggaaggccatgccagtgagtttcacgttcagctcaggga

SEQ ID NO: 9462 - RNA, 41 nt, synthetic construct
  source 1..41: mol_type = other RNA
cagtgagctttccgtttagctcagggatgtccttgcccaca

SEQ ID NO: 9463 - RNA, 41 nt, synthetic construct
  source 1..41: mol_type = other RNA
acggaaggccatgccagtgagcttctcgttcagctcagaga

SEQ ID NO: 9464 - RNA, 41 nt, synthetic construct
  source 1..41: mol_type = other RNA
cagtgagcttaacggttagcccagggatgaccttgcccaca

SEQ ID NO: 9465 - RNA, 41 nt, synthetic construct
  source 1..41: mol_type = other RNA
cagtgagctttccgtttagcccagggatgaccttgcccaca

SEQ ID NO: 9466 - RNA, 41 nt, synthetic construct
  source 1..41: mol_type = other RNA
acggaaggccatgccagtgagcttcccgtcaagcccaggga

SEQ ID NO: 9467 - RNA, 43 nt, synthetic construct
  source 1..43: mol_type = other RNA
acggaaggccatgccagtgagcttgccgttcagcccagaggga

SEQ ID NO: 9468 - RNA, 41 nt, synthetic construct
  source 1..41: mol_type = other RNA
cagtgagcttccagttcagccgagggatgaccttgcccaca

SEQ ID NO: 9469 - RNA, 41 nt, synthetic construct
  source 1..41: mol_type = other RNA
cagtgagcttaccgtttaccccagggttgaccttgcccaca

SEQ ID NO: 9470 - RNA, 41 nt, synthetic construct
  source 1..41: mol_type = other RNA
acggaaggccatgccagtgagctacccgtggcccagggaag

SEQ ID NO: 9471 - RNA, 41 nt, synthetic construct
  source 1..41: mol_type = other RNA
cagtgagcttcccgttcagttcagaggtgaccttgcccaca

SEQ ID NO: 9472 - RNA, 41 nt, synthetic construct
  source 1..41: mol_type = other RNA
cagtgagcttcccgtcaagcccagtgctgaccttgcccaca

SEQ ID NO: 9473 - RNA, 41 nt, synthetic construct
  source 1..41: mol_type = other RNA
cagtgagcttctcgttttgctaagggatgaccttgcccaca

SEQ ID NO: 9474 - RNA, 41 nt, synthetic construct
  source 1..41: mol_type = other RNA
cagtgagctttccgtttagctcagggatgaccttgcccaca

SEQ ID NO: 9475 - RNA, 41 nt, synthetic construct
  source 1..41: mol_type = other RNA
acggaaggccatgccagtgagcttccggttcagcccgggga

SEQ ID NO: 9476 - RNA, 41 nt, synthetic construct
  source 1..41: mol_type = other RNA
acggaaggccatgccagtgagcttccccctcggctcagggc

SEQ ID NO: 9477 - RNA, 41 nt, synthetic construct
  source 1..41: mol_type = other RNA
acggaaggccatgccagtgagcttcccattcagctcaggca

SEQ ID NO: 9478 - RNA, 41 nt, synthetic construct
  source 1..41: mol_type = other RNA
acggaaggccatgccagtgaacttcccgttaagcccaggga

SEQ ID NO: 9479 - RNA, 41 nt, synthetic construct
  source 1..41: mol_type = other RNA
cagtgagcttcacgttcagctcagagatgaccttgcccaca

SEQ ID NO: 9480 - RNA, 41 nt, synthetic construct
  source 1..41: mol_type = other RNA
cagtgagcttcccatttagcccagggatgaccttgcccaca

SEQ ID NO: 9481 - RNA, 41 nt, synthetic construct
  source 1..41: mol_type = other RNA
acggaaggccatgccagtgagcccaccgttcaccccagggt

SEQ ID NO: 9482 - RNA, 41 nt, synthetic construct
  source 1..41: mol_type = other RNA
cagtgagcttcccgttcagcccaggcgtgaccttgcccaca

SEQ ID NO: 9483 - RNA, 41 nt, synthetic construct
  source 1..41: mol_type = other RNA
cagtgagcttctcgtttggtccagggatgaccttgcccaca

SEQ ID NO: 9484 - RNA, 41 nt, synthetic construct
  source 1..41: mol_type = other RNA
acggaaggccatgccagtgagcttcccattcagcccaggca

SEQ ID NO: 9485 - RNA, 41 nt, synthetic construct
  source 1..41: mol_type = other RNA
cagtgagcttcccgttcagtccaggggtgaccttgcccaca

SEQ ID NO: 9486 - RNA, 41 nt, synthetic construct
  source 1..41: mol_type = other RNA
cagtgagcttcccgttcagctcaggggagaccttgcccaca

SEQ ID NO: 9487 - RNA, 41 nt, synthetic construct
  source 1..41: mol_type = other RNA
cagtgagcttcccgtttagcccagggctgaccttgcccaca

SEQ ID NO: 9488 - RNA, 41 nt, synthetic construct
  source 1..41: mol_type = other RNA
acggaaggccatgccagtgagcttcaacgttagcccaggga

SEQ ID NO: 9489 - RNA, 43 nt, synthetic construct
  source 1..43: mol_type = other RNA
cagtgagcttcccgttacgctcaaagggatgaccttgcccaca

SEQ ID NO: 9490 - RNA, 41 nt, synthetic construct
  source 1..41: mol_type = other RNA
cagtgagctttccgttcagctcagggatgtccttgcccaca

SEQ ID NO: 9491 - RNA, 41 nt, synthetic construct
  source 1..41: mol_type = other RNA
acggaaggccatgccagtgagcttcccgtatcgctcaggga

SEQ ID NO: 9492 - RNA, 42 nt, synthetic construct
  source 1..42: mol_type = other RNA
cagtgagcttcacgttcagctcagggatgcatcttgcccaca

SEQ ID NO: 9493 - RNA, 41 nt, synthetic construct
  source 1..41: mol_type = other RNA
cagtgagcttcccgtctagcccagggatgaccttgcccaca

SEQ ID NO: 9494 - RNA, 41 nt, synthetic construct
  source 1..41: mol_type = other RNA
acggaaggccatgccagtgagtttcccattcagctcaggga

SEQ ID NO: 9495 - RNA, 41 nt, synthetic construct
  source 1..41: mol_type = other RNA
cagtgagcttcccgtttggcccaaagatgatcttgcccaca

SEQ ID NO: 9496 - RNA, 41 nt, synthetic construct
  source 1..41: mol_type = other RNA
cagtgagcttcccgttcagccgaaggatgatcttgcccaca

SEQ ID NO: 9497 - RNA, 41 nt, synthetic construct
  source 1..41: mol_type = other RNA
cagtgagcttcccgtttagcccagggatgaccttgcccaca

SEQ ID NO: 9498 - RNA, 41 nt, synthetic construct
  source 1..41: mol_type = other RNA
acggaaggccatgccagtgagctacccgttaagccgaggga

SEQ ID NO: 9499 - RNA, 39 nt, synthetic construct
  source 1..39: mol_type = other RNA
acggaaggccatgccagtgagcttcccgtagcccaggga

SEQ ID NO: 9500 - RNA, 41 nt, synthetic construct
  source 1..41: mol_type = other RNA
acggaaggccatgccagtgaacttcccgttcagttcaggga

SEQ ID NO: 9501 - RNA, 38 nt, synthetic construct
  source 1..38: mol_type = other RNA
acggaaggccatgccagtgagcccgcccagcccaggga

SEQ ID NO: 9502 - RNA, 41 nt, synthetic construct
  source 1..41: mol_type = other RNA
cagtgagcttaccgtttagcccaggggtcaccttgcccaca

SEQ ID NO: 9503 - RNA, 41 nt, synthetic construct
  source 1..41: mol_type = other RNA
acggaaggccatgccagtgagcttaccgttcagcccaggga

SEQ ID NO: 9504 - RNA, 41 nt, synthetic construct
  source 1..41: mol_type = other RNA
cagtgagcttcccgtttagctcagggctgaccttgcccaca

SEQ ID NO: 9505 - RNA, 41 nt, synthetic construct
  source 1..41: mol_type = other RNA
acggaaggccatgccagtgagctttccgttcagcccagcga

SEQ ID NO: 9506 - RNA, 41 nt, synthetic construct
  source 1..41: mol_type = other RNA
cagtgagcttcccgctaagcccaaggatggccttgcccaca

SEQ ID NO: 9507 - RNA, 41 nt, synthetic construct
  source 1..41: mol_type = other RNA
cagtgagcttaacgttcgggttcaagactaccttgcccaca

SEQ ID NO: 9508 - RNA, 41 nt, synthetic construct
  source 1..41: mol_type = other RNA
cagtgagctttccgtttagcccagggatgtccttgcccaca

SEQ ID NO: 9509 - RNA, 41 nt, synthetic construct
  source 1..41: mol_type = other RNA
acggaaggccatgccagtgagcttccccctcggcccagggc

SEQ ID NO: 9510 - RNA, 41 nt, synthetic construct
  source 1..41: mol_type = other RNA
cagtgagcttcccgtttagcccagggagctccttgcccaca

SEQ ID NO: 9511 - RNA, 41 nt, synthetic construct
  source 1..41: mol_type = other RNA
cagtgagcttctcgttctgctcagggatgaccttgcccaca

SEQ ID NO: 9512 - RNA, 39 nt, synthetic construct
  source 1..39: mol_type = other RNA
acggaaggccatgccagtgagcttcccgtagctcaggga

SEQ ID NO: 9513 - RNA, 41 nt, synthetic construct
  source 1..41: mol_type = other RNA
cagtgagcttaccgtttacctcagggttgaccttgcccaca

SEQ ID NO: 9514 - RNA, 41 nt, synthetic construct
  source 1..41: mol_type = other RNA
cagtgagcttcccgtcaagcccagggatgaccttgcccaca

SEQ ID NO: 9515 - RNA, 41 nt, synthetic construct
  source 1..41: mol_type = other RNA
cagtgagcttcccgttcagctcagggatgcccttgcccaca

SEQ ID NO: 9516 - RNA, 41 nt, synthetic construct
  source 1..41: mol_type = other RNA
cagtgagcttcccgttcagcccacagatgaccttgcccaca

SEQ ID NO: 9517 - RNA, 41 nt, synthetic construct
  source 1..41: mol_type = other RNA
acggaaggccatgccagtgagctttccgttcagctcagcga

SEQ ID NO: 9518 - RNA, 41 nt, synthetic construct
  source 1..41: mol_type = other RNA
acggaaggccatgccagtgagctctccgtttagcccaggga

SEQ ID NO: 9519 - RNA, 41 nt, synthetic construct
  source 1..41: mol_type = other RNA
cagtgagcttcccgtttggctcaagactggccttgcccaca

SEQ ID NO: 9520 - RNA, 41 nt, synthetic construct
  source 1..41: mol_type = other RNA
cagtgagcttccagttcagcccagggatgaccttgcccaca

SEQ ID NO: 9521 - RNA, 41 nt, synthetic construct
  source 1..41: mol_type = other RNA
cagtgagcttcccgtttagtccagggatgaccttgcccaca

SEQ ID NO: 9522 - RNA, 41 nt, synthetic construct
  source 1..41: mol_type = other RNA
cagtgagcttgacgtttagttcaagggtcaccttgcccaca

SEQ ID NO: 9523 - RNA, 41 nt, synthetic construct
  source 1..41: mol_type = other RNA
cagtgagcttcccgttaagctcagggatgaacttgcccaca

SEQ ID NO: 9524 - RNA, 41 nt, synthetic construct
  source 1..41: mol_type = other RNA
acggaaggccatgccagtgagcttaacggtcagctcaggga

SEQ ID NO: 9525 - RNA, 41 nt, synthetic construct
  source 1..41: mol_type = other RNA
acggaaggccatgccagtgagcttcccgttcagccccggga

SEQ ID NO: 9526 - RNA, 41 nt, synthetic construct
  source 1..41: mol_type = other RNA
cagtgagcttcccattaagcccaaggatgaacttgcccaca

SEQ ID NO: 9527 - RNA, 41 nt, synthetic construct
  source 1..41: mol_type = other RNA
cagtgagcttcccgttccgcccagggatgaccttgcccaca

SEQ ID NO: 9528 - RNA, 41 nt, synthetic construct
  source 1..41: mol_type = other RNA
cagtgagcttcccgtttcgtccaggggtgaccttgcccaca

SEQ ID NO: 9529 - RNA, 41 nt, synthetic construct
  source 1..41: mol_type = other RNA
cagtgagcttcccgttaagcccagggatgaacttgcccaca

SEQ ID NO: 9530 - RNA, 41 nt, synthetic construct
  source 1..41: mol_type = other RNA
cagtgagcttagcgttcgggttcaaggataccttgcccaca

SEQ ID NO: 9531 - RNA, 41 nt, synthetic construct
  source 1..41: mol_type = other RNA
cagtgagcttcccgttcagtccagaggtgaccttgcccaca

SEQ ID NO: 9532 - RNA, 41 nt, synthetic construct
  source 1..41: mol_type = other RNA
cagtgagcttcccgctcagttcagggatggacttgcccaca

SEQ ID NO: 9533 - RNA, 41 nt, synthetic construct
  source 1..41: mol_type = other RNA
acggaaggccatgccagtgagctaccagttcagccgaggga

SEQ ID NO: 9534 - RNA, 41 nt, synthetic construct
  source 1..41: mol_type = other RNA
cagtgagcttcccgtttggctcaaagatgatcttgcccaca

SEQ ID NO: 9535 - RNA, 41 nt, synthetic construct
  source 1..41: mol_type = other RNA
cagtgagcttcccgtttggcccaagactggccttgcccaca

SEQ ID NO: 9536 - RNA, 41 nt, synthetic construct
  source 1..41: mol_type = other RNA
cagtgagcttcccgttcagccctgagatgaccttgcccaca

SEQ ID NO: 9537 - RNA, 41 nt, synthetic construct
  source 1..41: mol_type = other RNA
cagtgagcttcccattcagctcagggatccccttgcccaca

SEQ ID NO: 9538 - RNA, 42 nt, synthetic construct
  source 1..42: mol_type = other RNA
acggaaggccatgccagtgagctgtacgttctggttcaagga

SEQ ID NO: 9539 - RNA, 41 nt, synthetic construct
  source 1..41: mol_type = other RNA
cagtgagcttcccgttcagttcagggatggccttgcccaca

SEQ ID NO: 9540 - RNA, 41 nt, synthetic construct
  source 1..41: mol_type = other RNA
acggaaggccatgccagtgagctttccgttatgctcaggga

SEQ ID NO: 9541 - RNA, 41 nt, synthetic construct
  source 1..41: mol_type = other RNA
cagtgagcttcccgttcagctcagggatgaccttgcccaca

SEQ ID NO: 9542 - RNA, 41 nt, synthetic construct
  source 1..41: mol_type = other RNA
cagtgagcttcccgttcagtccagggatggccttgcccaca

SEQ ID NO: 9543 - RNA, 41 nt, synthetic construct
  source 1..41: mol_type = other RNA
cagtgagcttgacgtttagtccaagggtcaccttgcccaca

SEQ ID NO: 9544 - RNA, 41 nt, synthetic construct
  source 1..41: mol_type = other RNA
cagtgagcttcccgtttagctcagggagctccttgcccaca

SEQ ID NO: 9545 - RNA, 41 nt, synthetic construct
  source 1..41: mol_type = other RNA
cagtgagcttcccgctcagttcaggaatggacttgcccaca

SEQ ID NO: 9546 - RNA, 41 nt, synthetic construct
  source 1..41: mol_type = other RNA
cagtgagcttcccgttcagctcacagatgaccttgcccaca

SEQ ID NO: 9547 - RNA, 41 nt, synthetic construct
  source 1..41: mol_type = other RNA
acggaaggccatgccagtgagccctccgttcagcccaggga

SEQ ID NO: 9548 - RNA, 41 nt, synthetic construct
  source 1..41: mol_type = other RNA
acggaaggccatgccagtgagcttcccgttttgctaaggga

SEQ ID NO: 9549 - RNA, 41 nt, synthetic construct
  source 1..41: mol_type = other RNA
cagtgagcttcccgttcagcccaggggagaccttgcccaca

SEQ ID NO: 9550 - RNA, 41 nt, synthetic construct
  source 1..41: mol_type = other RNA
acggaaggccatgccagtgagccccccgttctgctcaggga

SEQ ID NO: 9551 - RNA, 41 nt, synthetic construct
  source 1..41: mol_type = other RNA
cagtgagcttcccgttcagctcagggatgatcttgcccaca

SEQ ID NO: 9552 - RNA, 39 nt, synthetic construct
  source 1..39: mol_type = other RNA
cagtgagcttcccgtagctcagggatgatcttgcccaca

SEQ ID NO: 9553 - RNA, 41 nt, synthetic construct
  source 1..41: mol_type = other RNA
cagtgagcttccagttacgcccagggaacaccttgcccaca

SEQ ID NO: 9554 - RNA, 42 nt, synthetic construct
  source 1..42: mol_type = other RNA
acggaaggccatgccagtgagcttcctactctcctccaggga

SEQ ID NO: 9555 - RNA, 41 nt, synthetic construct
  source 1..41: mol_type = other RNA
cagtgagcttcccgttaagccgagggatgaccttgcccaca

SEQ ID NO: 9556 - RNA, 41 nt, synthetic construct
  source 1..41: mol_type = other RNA
acggaaggccatgccagtgagcttccgttacagttcagggc

SEQ ID NO: 9557 - RNA, 43 nt, synthetic construct
  source 1..43: mol_type = other RNA
acggaaggccatgccagtgagcttgccgttcagctcagaggga

SEQ ID NO: 9558 - RNA, 41 nt, synthetic construct
  source 1..41: mol_type = other RNA
cagtgagcttcccgttcgcttcaaggatgaacttgcccaca

SEQ ID NO: 9559 - RNA, 41 nt, synthetic construct
  source 1..41: mol_type = other RNA
acggaaggccatgccagtgagcttcccgtcaagctcaggga

SEQ ID NO: 9560 - RNA, 41 nt, synthetic construct
  source 1..41: mol_type = other RNA
acggaaggccatgccagtgaggttcccgctaagcccaagga

SEQ ID NO: 9561 - RNA, 41 nt, synthetic construct
  source 1..41: mol_type = other RNA
cagtgagcttcccgttcagtctagggctggccttgcccaca

SEQ ID NO: 9562 - RNA, 41 nt, synthetic construct
  source 1..41: mol_type = other RNA
cagtgagcttcccattacgctaagggatgaccttgcccaca

SEQ ID NO: 9563 - RNA, 41 nt, synthetic construct
  source 1..41: mol_type = other RNA
cagtgagctttccgttcagccctgggatgaccttgcccaca

SEQ ID NO: 9564 - RNA, 41 nt, synthetic construct
  source 1..41: mol_type = other RNA
acggaaggccatgccagtgagtttaccgttcagcccagggg

SEQ ID NO: 9565 - RNA, 41 nt, synthetic construct
  source 1..41: mol_type = other RNA
cagtgagcttcccgtcaagctcagggatgaccttgcccaca

SEQ ID NO: 9566 - RNA, 41 nt, synthetic construct
  source 1..41: mol_type = other RNA
cagtgagcttttcgttatgctcagggatgaccttgcccaca

SEQ ID NO: 9567 - RNA, 41 nt, synthetic construct
  source 1..41: mol_type = other RNA
acggaaggccatgccagtgagcttccagttcagctcaggga

SEQ ID NO: 9568 - RNA, 41 nt, synthetic construct
  source 1..41: mol_type = other RNA
cagtgagcttttcgttcagcccagcgatgaccttgcccaca

SEQ ID NO: 9569 - RNA, 43 nt, synthetic construct
  source 1..43: mol_type = other RNA
cagtgagcttgccgttcagctcagagggacgaccttgcccaca

SEQ ID NO: 9570 - RNA, 41 nt, synthetic construct
  source 1..41: mol_type = other RNA
acggaaggccatgccagtgagccccccgttctgcccaggga

SEQ ID NO: 9571 - RNA, 41 nt, synthetic construct
  source 1..41: mol_type = other RNA
acggaaggccatgccagtgagcttcccgttcagctcagggc

SEQ ID NO: 9572 - RNA, 41 nt, synthetic construct
  source 1..41: mol_type = other RNA
acggaaggccatgccagtgagcttcccgttcagcccaggga

SEQ ID NO: 9573 - RNA, 41 nt, synthetic construct
  source 1..41: mol_type = other RNA
acggaaggccatgccagtgagcttaacggtcagcccaggga

SEQ ID NO: 9574 - RNA, 41 nt, synthetic construct
  source 1..41: mol_type = other RNA
acggaaggccatgccagtgagcttcccgttcagccaaggga

SEQ ID NO: 9575 - RNA, 41 nt, synthetic construct
  source 1..41: mol_type = other RNA
acggaaggccatgccagtgagcttcccgttcagcctagtta

SEQ ID NO: 9576 - RNA, 41 nt, synthetic construct
  source 1..41: mol_type = other RNA
cagtgagcttccagttcagctcagggatgaccttgcccaca

SEQ ID NO: 9577 - RNA, 41 nt, synthetic construct
  source 1..41: mol_type = other RNA
cagtgagcttctcgtatcgcccagggatgaccttgcccaca

SEQ ID NO: 9578 - RNA, 41 nt, synthetic construct
  source 1..41: mol_type = other RNA
cagtgagcttcccgttcagctcaggcgtgaccttgcccaca

SEQ ID NO: 9579 - RNA, 41 nt, synthetic construct
  source 1..41: mol_type = other RNA
cagtgagcttcacgttcagcccagagatgaccttgcccaca

SEQ ID NO: 9580 - RNA, 41 nt, synthetic construct
  source 1..41: mol_type = other RNA
acggaaggccatgccagtgagccttccggttggcccagggg

SEQ ID NO: 9581 - RNA, 41 nt, synthetic construct
  source 1..41: mol_type = other RNA
ttaagctcaaggatgaaattgcccacagccttggcagcgcc

SEQ ID NO: 9582 - RNA, 41 nt, synthetic construct
  source 1..41: mol_type = other RNA
cagtgagcttagcgttcgggtccaaggataccttgcccaca

SEQ ID NO: 9583 - RNA, 41 nt, synthetic construct
  source 1..41: mol_type = other RNA
cagtgagcttctcgttttgccaagggatgaccttgcccaca

SEQ ID NO: 9584 - RNA, 41 nt, synthetic construct
  source 1..41: mol_type = other RNA
ttttgctaagggatgaccttgcccacagccttggcagcgcc

SEQ ID NO: 9585 - RNA, 41 nt, synthetic construct
  source 1..41: mol_type = other RNA
acggaaggccatgccagtgagctgcccgtttggtccaggga

SEQ ID NO: 9586 - RNA, 42 nt, synthetic construct
  source 1..42: mol_type = other RNA
cagtgagcttcacgttcagctcagggatgccccttgcccaca

SEQ ID NO: 9587 - RNA, 41 nt, synthetic construct
  source 1..41: mol_type = other RNA
acggaaggccatgccagtgagcttcccgtttgacccaggta

SEQ ID NO: 9588 - RNA, 41 nt, synthetic construct
  source 1..41: mol_type = other RNA
acggaaggccatgccagtgagcttcacgttcagcccagaga

SEQ ID NO: 9589 - RNA, 41 nt, synthetic construct
  source 1..41: mol_type = other RNA
cagtgagcttctcgtttggccctgagatgatcttgcccaca

SEQ ID NO: 9590 - RNA, 41 nt, synthetic construct
  source 1..41: mol_type = other RNA
cagtgagcttcccgctcagtccaggaatggacttgcccaca

SEQ ID NO: 9591 - RNA, 41 nt, synthetic construct
  source 1..41: mol_type = other RNA
cagtgagcttcccgttcagcttagttatgaccttgcccaca

SEQ ID NO: 9592 - RNA, 41 nt, synthetic construct
  source 1..41: mol_type = other RNA
acggaaggccatgccagtgagcttccagttcagcccaggga

SEQ ID NO: 9593 - RNA, 41 nt, synthetic construct
  source 1..41: mol_type = other RNA
ttcagctcagagatgaccttgcccacagccttggcagcgcc

SEQ ID NO: 9594 - RNA, 42 nt, synthetic construct
  source 1..42: mol_type = other RNA
acggaaggccatgccagtgagcttgcccgttcagccctggga

SEQ ID NO: 9595 - RNA, 41 nt, synthetic construct
  source 1..41: mol_type = other RNA
acggaaggccatgccagtgagcttcccgttcagtccaggga

SEQ ID NO: 9596 - RNA, 41 nt, synthetic construct
  source 1..41: mol_type = other RNA
acggaaggccatgccagtgagcttcccgtccagccccggga

SEQ ID NO: 9597 - RNA, 41 nt, synthetic construct
  source 1..41: mol_type = other RNA
acggaaggccatgccagtgagcatcccattacgctaaggga

SEQ ID NO: 9598 - RNA, 41 nt, synthetic construct
  source 1..41: mol_type = other RNA
acggaaggccatgccagtgagcccaccgttcacctcagggt

SEQ ID NO: 9599 - RNA, 41 nt, synthetic construct
  source 1..41: mol_type = other RNA
acggaaggccatgccagtgagcttcccgtctagcccaggga

SEQ ID NO: 9600 - RNA, 41 nt, synthetic construct
  source 1..41: mol_type = other RNA
acggaaggccatgccagtgagcttctcgttcagcccagaga

SEQ ID NO: 9601 - RNA, 41 nt, synthetic construct
  source 1..41: mol_type = other RNA
acggaaggccatgccagtgagtttcacgttcagcccaggga

SEQ ID NO: 9602 - RNA, 41 nt, synthetic construct
  source 1..41: mol_type = other RNA
cagtgagcttcccgtttagtccatcgttggccttgcccaca

SEQ ID NO: 9603 - RNA, 41 nt, synthetic construct
  source 1..41: mol_type = other RNA
acggaaggccatgccagtgagcttcccgtatcgcccaggga

SEQ ID NO: 9604 - RNA, 41 nt, synthetic construct
  source 1..41: mol_type = other RNA
acggaaggccatgccagtgagctgtccgtttagcccagcga

SEQ ID NO: 9605 - RNA, 41 nt, synthetic construct
  source 1..41: mol_type = other RNA
cagtgagcttctcgtttggttcagggatgaccttgcccaca

SEQ ID NO: 9606 - RNA, 43 nt, synthetic construct
  source 1..43: mol_type = other RNA
cagtgagcttgccgttcagcccagagggacgaccttgcccaca

SEQ ID NO: 9607 - RNA, 41 nt, synthetic construct
  source 1..41: mol_type = other RNA
cagtgagctttccgttcagcccagggatgaccttgcccaca

SEQ ID NO: 9608 - RNA, 41 nt, synthetic construct
  source 1..41: mol_type = other RNA
acggaaggccatgccagtgagccctccgttcagctcaggga

SEQ ID NO: 9609 - RNA, 41 nt, synthetic construct
  source 1..41: mol_type = other RNA
acggaaggccatgccagtgagctctccgtttagctcaggga

SEQ ID NO: 9610 - RNA, 41 nt, synthetic construct
  source 1..41: mol_type = other RNA
cagtgagcttaccgtttagttcaggtacggccttgcccaca

SEQ ID NO: 9611 - RNA, 41 nt, synthetic construct
  source 1..41: mol_type = other RNA
ttcagctcaggcatgaccttgcccacagccttggcagcgcc

SEQ ID NO: 9612 - RNA, 41 nt, synthetic construct
  source 1..41: mol_type = other RNA
cagtgagcttctcgtttggccctgagatggtcttgcccaca

SEQ ID NO: 9613 - RNA, 42 nt, synthetic construct
  source 1..42: mol_type = other RNA
cagtgagcttctcgttcagctcagagaccgaccttgcccaca

SEQ ID NO: 9614 - RNA, 41 nt, synthetic construct
  source 1..41: mol_type = other RNA
acggaaggccatgccagtgagattctcttacagcccaggca

SEQ ID NO: 9615 - RNA, 41 nt, synthetic construct
  source 1..41: mol_type = other RNA
tttagctcagggctgactttgcccacagccttggcagcgcc

SEQ ID NO: 9616 - RNA, 41 nt, synthetic construct
  source 1..41: mol_type = other RNA
acggaaggccatgccagtgaacttcccgttcagtccaggga

SEQ ID NO: 9617 - RNA, 41 nt, synthetic construct
  source 1..41: mol_type = other RNA
acggaaggccatgccagtgagactcccgttcagctcaggga

SEQ ID NO: 9618 - RNA, 41 nt, synthetic construct
  source 1..41: mol_type = other RNA
acggaaggccatgccagtgagcttcccactcagccccggga

SEQ ID NO: 9619 - RNA, 41 nt, synthetic construct
  source 1..41: mol_type = other RNA
cagtgagcttcacgtccagtcgagggatggccttgcccaca

SEQ ID NO: 9620 - RNA, 41 nt, synthetic construct
  source 1..41: mol_type = other RNA
acggaaggccatgccagtgagcttgccgttcggccaaggga

SEQ ID NO: 9621 - RNA, 41 nt, synthetic construct
  source 1..41: mol_type = other RNA
acggaaggccatgccagtgagagtcccagcaggcccaggga

SEQ ID NO: 9622 - RNA, 41 nt, synthetic construct
  source 1..41: mol_type = other RNA
acggaaggccatgccagtgagctttccgttatgcccaggga

SEQ ID NO: 9623 - RNA, 41 nt, synthetic construct
  source 1..41: mol_type = other RNA
acggaaggccatgccagtgagcttcccattaagctcaagga

SEQ ID NO: 9624 - RNA, 41 nt, synthetic construct
  source 1..41: mol_type = other RNA
acggaaggccatgccagtgagtttcccgttcggctcaagac

SEQ ID NO: 9625 - RNA, 42 nt, synthetic construct
  source 1..42: mol_type = other RNA
acggaaggccatgccagtgagcttcctactctccttcaggga

SEQ ID NO: 9626 - RNA, 41 nt, synthetic construct
  source 1..41: mol_type = other RNA
acggaaggccatgccagtgagcttcccattcagctcaggga

SEQ ID NO: 9627 - RNA, 41 nt, synthetic construct
  source 1..41: mol_type = other RNA
cagtgagcttcccgttcagcccagggatgcccttgcccaca

SEQ ID NO: 9628 - RNA, 41 nt, synthetic construct
  source 1..41: mol_type = other RNA
cagtgagctttccgttcagcccagggatgtccttgcccaca

SEQ ID NO: 9629 - RNA, 41 nt, synthetic construct
  source 1..41: mol_type = other RNA
cagtgagcttcccactcagccgaggcatgaacttgcccaca

SEQ ID NO: 9630 - RNA, 41 nt, synthetic construct
  source 1..41: mol_type = other RNA
ttcagcccagggatgaccttacccacagccttggcagcgcc

SEQ ID NO: 9631 - RNA, 41 nt, synthetic construct
  source 1..41: mol_type = other RNA
tttagcccggggataaacttgcccacagccttggcagcgcc

SEQ ID NO: 9632 - RNA, 41 nt, synthetic construct
  source 1..41: mol_type = other RNA
ctcagctgaggcatgaacttgcccacagccttggcagcgcc

SEQ ID NO: 9633 - RNA, 41 nt, synthetic construct
  source 1..41: mol_type = other RNA
cagtgagcttcacgtccagttgagggatggccttgcccaca

SEQ ID NO: 9634 - RNA, 41 nt, synthetic construct
  source 1..41: mol_type = other RNA
ttctggtccaaggataccttgcccacagccttggcagcgcc

SEQ ID NO: 9635 - RNA, 41 nt, synthetic construct
  source 1..41: mol_type = other RNA
cagtgagcttaccgtttagtccaggtacggccttgcccaca

SEQ ID NO: 9636 - RNA, 41 nt, synthetic construct
  source 1..41: mol_type = other RNA
cagtgagcttccagttacgctcagggaacaccttgcccaca

SEQ ID NO: 9637 - RNA, 40 nt, synthetic construct
  source 1..40: mol_type = other RNA
cagtgagcttccgttcagcccagggatgaccttgcccaca

SEQ ID NO: 9638 - RNA, 39 nt, synthetic construct
  source 1..39: mol_type = other RNA
cagtgagcttcccgtagcccagggatgatcttgcccaca

SEQ ID NO: 9639 - RNA, 41 nt, synthetic construct
  source 1..41: mol_type = other RNA
cagtgagctttccgttcagcgctgggatgaccttgcccaca

SEQ ID NO: 9640 - RNA, 41 nt, synthetic construct
  source 1..41: mol_type = other RNA
acggaaggccatgccagtgagcttcaacgttagctcaggga

SEQ ID NO: 9641 - RNA, 41 nt, synthetic construct
  source 1..41: mol_type = other RNA
tcaagttcagggttggccttgcccacagccttggcagcgcc

SEQ ID NO: 9642 - RNA, 41 nt, synthetic construct
  source 1..41: mol_type = other RNA
cagtgagcttcctattctgcccagggctgaccttgcccaca

SEQ ID NO: 9643 - RNA, 41 nt, synthetic construct
  source 1..41: mol_type = other RNA
acggaaggccatgccagtgagcggaccgttcagttcaggta

SEQ ID NO: 9644 - RNA, 41 nt, synthetic construct
  source 1..41: mol_type = other RNA
acggaaggccatgccagtgagagtcccatacgattcaggga

SEQ ID NO: 9645 - RNA, 41 nt, synthetic construct
  source 1..41: mol_type = other RNA
acggaaggccatgccagtgaaattcccgttcagccctggga

SEQ ID NO: 9646 - RNA, 41 nt, synthetic construct
  source 1..41: mol_type = other RNA
acggaaggccatgccagtgagccacccgtttagcccaggga

SEQ ID NO: 9647 - RNA, 41 nt, synthetic construct
  source 1..41: mol_type = other RNA
cagtgagcttccggttcagcaccggaatggccttgcccaca

SEQ ID NO: 9648 - RNA, 39 nt, synthetic construct
  source 1..39: mol_type = other RNA
cagtgagcttccgtttcaaccgagggtaccttgcccaca

SEQ ID NO: 9649 - RNA, 40 nt, synthetic construct
  source 1..40: mol_type = other RNA
cagtgagctttccgttaggcccaggtcgaccttgcccaca

SEQ ID NO: 9650 - RNA, 41 nt, synthetic construct
  source 1..41: mol_type = other RNA
cagtgagcttcccgttcagcccagggatgaccttgcccaca

SEQ ID NO: 9651 - RNA, 41 nt, synthetic construct
  source 1..41: mol_type = other RNA
acggaaggccatgccagtgagtttcccgttcggcccaagac

SEQ ID NO: 9652 - RNA, 42 nt, synthetic construct
  source 1..42: mol_type = other RNA
acggaaggccatgccagtgagctgagcgttcgggtccaagga

SEQ ID NO: 9653 - RNA, 41 nt, synthetic construct
  source 1..41: mol_type = other RNA
cagtgagcttcccgtttagttcatcgttggccttgcccaca

SEQ ID NO: 9654 - RNA, 41 nt, synthetic construct
  source 1..41: mol_type = other RNA
acggaaggccatgccagtgagcatcccgttcagttcaggga

SEQ ID NO: 9655 - RNA, 41 nt, synthetic construct
  source 1..41: mol_type = other RNA
cagtgagcttcaacgttagcccagggatccccttgcccaca

SEQ ID NO: 9656 - RNA, 41 nt, synthetic construct
  source 1..41: mol_type = other RNA
cagtgagcttcccgtctagctcagggatgaccttgcccaca

SEQ ID NO: 9657 - RNA, 41 nt, synthetic construct
  source 1..41: mol_type = other RNA
ttctgctcagggctgaccttgcccacagccttggcagcgcc

SEQ ID NO: 9658 - RNA, 38 nt, synthetic construct
  source 1..38: mol_type = other RNA
acggaaggccatgccagtgagcccgcccagctcaggga

SEQ ID NO: 9659 - RNA, 41 nt, synthetic construct
  source 1..41: mol_type = other RNA
cagtgagcttctcttacagcccaggcatgatcttgcccaca

SEQ ID NO: 9660 - RNA, 41 nt, synthetic construct
  source 1..41: mol_type = other RNA
acggaaggccatgccagtgagcctcccgttcagttcagggg

SEQ ID NO: 9661 - RNA, 41 nt, synthetic construct
  source 1..41: mol_type = other RNA
cagtgagcttcccattacgccaagggatgaccttgcccaca

SEQ ID NO: 9662 - RNA, 41 nt, synthetic construct
  source 1..41: mol_type = other RNA
cagtgagcttctcgtatcgctcagggatgaccttgcccaca

SEQ ID NO: 9663 - RNA, 41 nt, synthetic construct
  source 1..41: mol_type = other RNA
ttcagcccaggcatgaccttgcccacagccttggcagcgcc

SEQ ID NO: 9664 - RNA, 42 nt, synthetic construct
  source 1..42: mol_type = other RNA
cagtgagcttctcgttcagcccagagaccgaccttgcccaca

SEQ ID NO: 9665 - RNA, 41 nt, synthetic construct
  source 1..41: mol_type = other RNA
acggaaggccatgccagtgagcttcccgttcggctcaaaga

SEQ ID NO: 9666 - RNA, 41 nt, synthetic construct
  source 1..41: mol_type = other RNA
acggaaggccatgccagtgagcttcccgctaagctccggga

SEQ ID NO: 9667 - RNA, 41 nt, synthetic construct
  source 1..41: mol_type = other RNA
cagtgagcttcccgttcagttcaggggtgaccttgcccaca

SEQ ID NO: 9668 - RNA, 41 nt, synthetic construct
  source 1..41: mol_type = other RNA
acggaaggccatgccagtgagctaccgtttcaaccgagggt

SEQ ID NO: 9669 - RNA, 49 nt, synthetic construct
  source 1..49: mol_type = other RNA
cagtgagcttcccagcaggctcagggatgtctcctgcatcttgcccaca

SEQ ID NO: 9670 - RNA, 41 nt, synthetic construct
  source 1..41: mol_type = other RNA
cagtgagcttctcgttctgcccagggatgaccttgcccaca

SEQ ID NO: 9671 - RNA, 41 nt, synthetic construct
  source 1..41: mol_type = other RNA
acggaaggccatgccagtgagcttcccgtctagctcaggga

SEQ ID NO: 9672 - RNA, 41 nt, synthetic construct
  source 1..41: mol_type = other RNA
cagtgagcttcccattcagcccaggcatgaccttgcccaca

SEQ ID NO: 9673 - RNA, 41 nt, synthetic construct
  source 1..41: mol_type = other RNA
cagtgagcttcccactgagcccaggcatgaccttgcccaca

SEQ ID NO: 9674 - RNA, 41 nt, synthetic construct
  source 1..41: mol_type = other RNA
acggaaggccatgccagtgagtttcccattcagcccaggga

SEQ ID NO: 9675 - RNA, 41 nt, synthetic construct
  source 1..41: mol_type = other RNA
acggaaggccatgccagtgaaattcccgttcagcgctggga

SEQ ID NO: 9676 - RNA, 41 nt, synthetic construct
  source 1..41: mol_type = other RNA
acggaaggccatgccagtgagcttgccgttcggctaaggga

SEQ ID NO: 9677 - RNA, 41 nt, synthetic construct
  source 1..41: mol_type = other RNA
ttcagccgagggatgaccatgcccacagccttggcagcgcc

SEQ ID NO: 9678 - RNA, 43 nt, synthetic construct
  source 1..43: mol_type = other RNA
acggaaggccatgccagtgagcttcccgttacgcccaaaggga

SEQ ID NO: 9679 - RNA, 45 nt, synthetic construct
  source 1..45: mol_type = other RNA
cagtgagcttccccctcggcccagggcgacaagaccttgcccaca

SEQ ID NO: 9680 - RNA, 41 nt, synthetic construct
  source 1..41: mol_type = other RNA
cagtgagcttcccgtggcccagggaagtgatcttgcccaca

SEQ ID NO: 9681 - RNA, 41 nt, synthetic construct
  source 1..41: mol_type = other RNA
cagtgagctttacgttctggttcaaggataccttgcccaca

SEQ ID NO: 9682 - RNA, 41 nt, synthetic construct
  source 1..41: mol_type = other RNA
cagtgagcttcccgtttagttcagggatggacttgcccaca

SEQ ID NO: 9683 - RNA, 42 nt, synthetic construct
  source 1..42: mol_type = other RNA
cagtgagcttccggttggcccagggggaagaccttgcccaca

SEQ ID NO: 9684 - RNA, 41 nt, synthetic construct
  source 1..41: mol_type = other RNA
acggaaggccatgccagtgaggttcccgttcggcccaggga

SEQ ID NO: 9685 - RNA, 41 nt, synthetic construct
  source 1..41: mol_type = other RNA
cagtgagcttcccgtcaagtccagggttggccttgcccaca

SEQ ID NO: 9686 - RNA, 41 nt, synthetic construct
  source 1..41: mol_type = other RNA
acggaaggccatgccagtgagcatcccgtcaagttcagggt

SEQ ID NO: 9687 - RNA, 41 nt, synthetic construct
  source 1..41: mol_type = other RNA
cagtgagcttcccgtcaagttcagggttggccttgcccaca

SEQ ID NO: 9688 - RNA, 41 nt, synthetic construct
  source 1..41: mol_type = other RNA
acggaaggccatgccagtgaggtccccgttcagcccaggga

SEQ ID NO: 9689 - RNA, 41 nt, synthetic construct
  source 1..41: mol_type = other RNA
cagtgagcttcccgttcagcccagggatgatcttgcccaca

SEQ ID NO: 9690 - RNA, 41 nt, synthetic construct
  source 1..41: mol_type = other RNA
acggaaggccatgccagtgagcttcccgttcagctgaagga

SEQ ID NO: 9691 - RNA, 41 nt, synthetic construct
  source 1..41: mol_type = other RNA
ctgagcccaggcatgaccttgcccacagccttggcagcgcc

SEQ ID NO: 9692 - RNA, 41 nt, synthetic construct
  source 1..41: mol_type = other RNA
acggaaggccatgccagtgagcttcccgttaagccccggca

SEQ ID NO: 9693 - RNA, 41 nt, synthetic construct
  source 1..41: mol_type = other RNA
cagtgagcttcccgtcaagctcagtgctgaccttgcccaca

SEQ ID NO: 9694 - RNA, 41 nt, synthetic construct
  source 1..41: mol_type = other RNA
cagtgagcttctcgtttggctctgagatgatcttgcccaca

SEQ ID NO: 9695 - RNA, 42 nt, synthetic construct
  source 1..42: mol_type = other RNA
cagtgagcttcacgttcagcccagggatgccccttgcccaca

SEQ ID NO: 9696 - RNA, 41 nt, synthetic construct
  source 1..41: mol_type = other RNA
cagtgagcttttcgttatgcccagggatgaccttgcccaca

SEQ ID NO: 9697 - RNA, 41 nt, synthetic construct
  source 1..41: mol_type = other RNA
acggaaggccatgccagtgagcttcccgttcgcttcaagga

SEQ ID NO: 9698 - RNA, 41 nt, synthetic construct
  source 1..41: mol_type = other RNA
acggaaggccatgccagtgagctgtccgtttagctcagcga

SEQ ID NO: 9699 - RNA, 41 nt, synthetic construct
  source 1..41: mol_type = other RNA
cagtgagctttacgttctggtccaaggataccttgcccaca

SEQ ID NO: 9700 - RNA, 41 nt, synthetic construct
  source 1..41: mol_type = other RNA
acggaaggccatgccagtgagcatcccgttcagtccaggga

SEQ ID NO: 9701 - RNA, 41 nt, synthetic construct
  source 1..41: mol_type = other RNA
acggaaggccatgccagtgagcctccagttacgcccaggga

SEQ ID NO: 9702 - RNA, 41 nt, synthetic construct
  source 1..41: mol_type = other RNA
cagtgagcttcccgctcagtccagggatggacttgcccaca

SEQ ID NO: 9703 - RNA, 43 nt, synthetic construct
  source 1..43: mol_type = other RNA
cagtgagcttcccgttacgcccaaagggatgaccttgcccaca

SEQ ID NO: 9704 - RNA, 42 nt, synthetic construct
  source 1..42: mol_type = other RNA
cagtgagcttcacgttcagcccagggatgcatcttgcccaca

SEQ ID NO: 9705 - RNA, 41 nt, synthetic construct
  source 1..41: mol_type = other RNA
acggaaggccatgccagtgagcctccagttacgctcaggga

SEQ ID NO: 9706 - RNA, 41 nt, synthetic construct
  source 1..41: mol_type = other RNA
cagtgagcttcccgtttagttcatggttggccttgcccaca

SEQ ID NO: 9707 - RNA, 41 nt, synthetic construct
  source 1..41: mol_type = other RNA
acggaaggccatgccagtgagcgtcacgtccagtcgaggga

SEQ ID NO: 9708 - RNA, 41 nt, synthetic construct
  source 1..41: mol_type = other RNA
cagtgagcttcccgtccagtccatagctggccttgcccaca

SEQ ID NO: 9709 - RNA, 41 nt, synthetic construct
  source 1..41: mol_type = other RNA
ttcagcccacagatgaccttgcccacagccttggcagcgcc

SEQ ID NO: 9710 - RNA, 41 nt, synthetic construct
  source 1..41: mol_type = other RNA
acggaaggccatgccagtgagcttcccgttcggcccaaaga

SEQ ID NO: 9711 - RNA, 41 nt, synthetic construct
  source 1..41: mol_type = other RNA
cagtgagcttcccatttagctcagggatgaccttgcccaca

SEQ ID NO: 9712 - RNA, 41 nt, synthetic construct
  source 1..41: mol_type = other RNA
cagtgagcttcccgtttagctcagggatgaccttgcccaca

SEQ ID NO: 9713 - RNA, 41 nt, synthetic construct
  source 1..41: mol_type = other RNA
cagtgagcttcccatacgattcagggatggccttgcccaca

SEQ ID NO: 9714 - RNA, 41 nt, synthetic construct
  source 1..41: mol_type = other RNA
ttatgctcagggatgaccttgcccacagccttggcagcgcc

SEQ ID NO: 9715 - RNA, 41 nt, synthetic construct
  source 1..41: mol_type = other RNA
tccagttgagggatggccttgcccacagccttggcagcgcc

SEQ ID NO: 9716 - RNA, 41 nt, synthetic construct
  source 1..41: mol_type = other RNA
tttagtccaagggtcaccttgcccacagccttggcagcgcc

SEQ ID NO: 9717 - RNA, 41 nt, synthetic construct
  source 1..41: mol_type = other RNA
acggaaggccatgccagtgaacttcccgttaagctcaggga

SEQ ID NO: 9718 - RNA, 41 nt, synthetic construct
  source 1..41: mol_type = other RNA
acggaaggccatgccagtgagccccccgttaggcccaggtc

SEQ ID NO: 9719 - RNA, 41 nt, synthetic construct
  source 1..41: mol_type = other RNA
acggaaggccatgccagtgagcttcccactcagccgaggca

SEQ ID NO: 9720 - RNA, 41 nt, synthetic construct
  source 1..41: mol_type = other RNA
ttaagccccggcatgaccttgcccacagccttggcagcgcc

SEQ ID NO: 9721 - RNA, 41 nt, synthetic construct
  source 1..41: mol_type = other RNA
acggaaggccatgccagtgagactcccgttccgcccaggga

SEQ ID NO: 9722 - RNA, 41 nt, synthetic construct
  source 1..41: mol_type = other RNA
acggaaggccatgccagtgaccttcccgttcagctcaggga

SEQ ID NO: 9723 - RNA, 41 nt, synthetic construct
  source 1..41: mol_type = other RNA
cagtgagcttccggttcagcatcggaatggccttgcccaca

SEQ ID NO: 9724 - RNA, 39 nt, synthetic construct
  source 1..39: mol_type = other RNA
cagtgagcttccgtttcaactgagggtaccttgcccaca

SEQ ID NO: 9725 - RNA, 41 nt, synthetic construct
  source 1..41: mol_type = other RNA
ttcagcccagggatgaccttgcccacagccttggcagcgcc

SEQ ID NO: 9726 - RNA, 41 nt, synthetic construct
  source 1..41: mol_type = other RNA
cagtgagcttcccgttcagccaagggatgcccttgcccaca

SEQ ID NO: 9727 - RNA, 41 nt, synthetic construct
  source 1..41: mol_type = other RNA
cagtgagcttcccattaagctcaaggatgaacttgcccaca

SEQ ID NO: 9728 - RNA, 41 nt, synthetic construct
  source 1..41: mol_type = other RNA
cagtgagcttcccgttaagccccggcatgaccttgcccaca

SEQ ID NO: 9729 - RNA, 41 nt, synthetic construct
  source 1..41: mol_type = other RNA
tttcgtccaggggtgactttgcccacagccttggcagcgcc

SEQ ID NO: 9730 - RNA, 41 nt, synthetic construct
  source 1..41: mol_type = other RNA
acggaaggccatgccagtgagcttcccgtccagttcatagc

SEQ ID NO: 9731 - RNA, 41 nt, synthetic construct
  source 1..41: mol_type = other RNA
cagtgagcttcccgtccagttcatagctggccttgcccaca

SEQ ID NO: 9732 - RNA, 41 nt, synthetic construct
  source 1..41: mol_type = other RNA
acggaaggccatgccagtgagcgtcccgttcagctcaggcg

SEQ ID NO: 9733 - RNA, 41 nt, synthetic construct
  source 1..41: mol_type = other RNA
acggaaggccatgccagtgagctgcccgtttggttcaggga

SEQ ID NO: 9734 - RNA, 41 nt, synthetic construct
  source 1..41: mol_type = other RNA
acggaaggccatgccagtgagagtcccatacgatccaggga

SEQ ID NO: 9735 - RNA, 41 nt, synthetic construct
  source 1..41: mol_type = other RNA
ctcagtcccgggatggacttgcccacagccttggcagcgcc

SEQ ID NO: 9736 - RNA, 41 nt, synthetic construct
  source 1..41: mol_type = other RNA
cagtgagcttcccgttccgcccagggatgaacttgcccaca

SEQ ID NO: 9737 - RNA, 41 nt, synthetic construct
  source 1..41: mol_type = other RNA
acggaaggccatgccagtgagccacccgtttagctcaggga

SEQ ID NO: 9738 - RNA, 41 nt, synthetic construct
  source 1..41: mol_type = other RNA
acggaaggccatgccagtgagccttccggttggctcagggg

SEQ ID NO: 9739 - RNA, 40 nt, synthetic construct
  source 1..40: mol_type = other RNA
ttagcccagggatccccttgcccacagccttggcagcgcc

SEQ ID NO: 9740 - RNA, 41 nt, synthetic construct
  source 1..41: mol_type = other RNA
cagtgagcttcccgtttagtccatggttggccttgcccaca

SEQ ID NO: 9741 - RNA, 49 nt, synthetic construct
  source 1..49: mol_type = other RNA
gcaggcccagggatgtctcctgcatcttgcccacagccttggcagcgcc

SEQ ID NO: 9742 - RNA, 41 nt, synthetic construct
  source 1..41: mol_type = other RNA
cagtgagcttcacgttgggttcagggttggccttgcccaca

SEQ ID NO: 9743 - RNA, 43 nt, synthetic construct
  source 1..43: mol_type = other RNA
cagtgagcttcccgtttagttcccgcagatgaccttgcccaca

SEQ ID NO: 9744 - RNA, 41 nt, synthetic construct
  source 1..41: mol_type = other RNA
ttcagcttagttatgaccttgcccacagccttggcagcgcc

SEQ ID NO: 9745 - RNA, 41 nt, synthetic construct
  source 1..41: mol_type = other RNA
cagtgagcttcctattctgctcagggctgaccttgcccaca

SEQ ID NO: 9746 - RNA, 41 nt, synthetic construct
  source 1..41: mol_type = other RNA
acggaaggccatgccagtgaccttcccattctgcccagggc

SEQ ID NO: 9747 - RNA, 41 nt, synthetic construct
  source 1..41: mol_type = other RNA
cagtgagcttaccgttcagcccagggatgagcttgcccaca

SEQ ID NO: 9748 - RNA, 42 nt, synthetic construct
  source 1..42: mol_type = other RNA
acggaaggccatgccagtgagctgtacgttctggtccaagga

SEQ ID NO: 9749 - RNA, 41 nt, synthetic construct
  source 1..41: mol_type = other RNA
acggaaggccatgccagtgagcatcccattacgccaaggga

SEQ ID NO: 9750 - RNA, 41 nt, synthetic construct
  source 1..41: mol_type = other RNA
cagtgagcttccggttcagcccgggggtgaccttgcccaca

SEQ ID NO: 9751 - RNA, 43 nt, synthetic construct
  source 1..43: mol_type = other RNA
cagtgagcttcccggattggtcatagggatgtacttgcccaca

SEQ ID NO: 9752 - RNA, 41 nt, synthetic construct
  source 1..41: mol_type = other RNA
cagtgagcttaacgttcgggtccaagactaccttgcccaca

SEQ ID NO: 9753 - RNA, 41 nt, synthetic construct
  source 1..41: mol_type = other RNA
cagtgagcttcccgttcagctgaaggatgatcttgcccaca

SEQ ID NO: 9754 - RNA, 41 nt, synthetic construct
  source 1..41: mol_type = other RNA
acggaaggccatgccagtgagcttcccgttttgccaaggga

SEQ ID NO: 9755 - RNA, 39 nt, synthetic construct
  source 1..39: mol_type = other RNA
tagctcagggatgatcttgcccacagccttggcagcgcc

SEQ ID NO: 9756 - RNA, 41 nt, synthetic construct
  source 1..41: mol_type = other RNA
acggaaggccatgccagtgagcttcccactcagcaccggga

SEQ ID NO: 9757 - RNA, 41 nt, synthetic construct
  source 1..41: mol_type = other RNA
ctaagcccaaggatggccttgcccacagccttggcagcgcc

SEQ ID NO: 9758 - RNA, 41 nt, synthetic construct
  source 1..41: mol_type = other RNA
cagtgagcttcccgtttagtccagggatggacttgcccaca

SEQ ID NO: 9759 - RNA, 43 nt, synthetic construct
  source 1..43: mol_type = other RNA
tacgatccagggatggctctttgcccacagccttggcagcgcc

SEQ ID NO: 9760 - RNA, 42 nt, synthetic construct
  source 1..42: mol_type = other RNA
cagtgagcttcccgttcagcccaagggatgcccttgcccaca

SEQ ID NO: 9761 - RNA, 41 nt, synthetic construct
  source 1..41: mol_type = other RNA
acggaaggccatgccagtgagactcccgttcagcccaggga

SEQ ID NO: 9762 - RNA, 41 nt, synthetic construct
  source 1..41: mol_type = other RNA
ttcagcccaggggagacaacgcccacagccttggcagcgcc

SEQ ID NO: 9763 - RNA, 41 nt, synthetic construct
  source 1..41: mol_type = other RNA
ttcagcccagcgatgaccttgcccacagccttggcagcgcc

SEQ ID NO: 9764 - RNA, 41 nt, synthetic construct
  source 1..41: mol_type = other RNA
ttatgcccagggatgaccttgcccacagccttggcagcgcc

SEQ ID NO: 9765 - RNA, 41 nt, synthetic construct
  source 1..41: mol_type = other RNA
ctgagctcaggcatgaccttgcccacagccttggcagcgcc

SEQ ID NO: 9766 - RNA, 41 nt, synthetic construct
  source 1..41: mol_type = other RNA
tccagtcgagggatggccttgcccacagccttggcagcgcc

SEQ ID NO: 9767 - RNA, 39 nt, synthetic construct
  source 1..39: mol_type = other RNA
acggaaggccatgccagtgatttccgttcagctcaggga

SEQ ID NO: 9768 - RNA, 41 nt, synthetic construct
  source 1..41: mol_type = other RNA
tttagttcagggatgaccttgcccacagccttggcagcgcc

SEQ ID NO: 9769 - RNA, 37 nt, synthetic construct
  source 1..37: mol_type = other RNA
cagtgagcttcccagctcagggatgaccttgcccaca

SEQ ID NO: 9770 - RNA, 42 nt, synthetic construct
  source 1..42: mol_type = other RNA
cagtgagcttccggttggctcagggggaagaccttgcccaca

SEQ ID NO: 9771 - RNA, 42 nt, synthetic construct
  source 1..42: mol_type = other RNA
acggaaggccatgccagtgagctaccattctgggttcaagga

SEQ ID NO: 9772 - RNA, 41 nt, synthetic construct
  source 1..41: mol_type = other RNA
acggaaggccatgccagtgagcttccggttcagcaccggaa

SEQ ID NO: 9773 - RNA, 41 nt, synthetic construct
  source 1..41: mol_type = other RNA
cagtgagcttctcgttcagttctaggattatcttgcccaca

SEQ ID NO: 9774 - RNA, 40 nt, synthetic construct
  source 1..40: mol_type = other RNA
cagtgagctttccgttaggctcaggtcgaccttgcccaca

SEQ ID NO: 9775 - RNA, 41 nt, synthetic construct
  source 1..41: mol_type = other RNA
acggaaggccatgccagtgagcttcccgttcagttcatcgt

SEQ ID NO: 9776 - RNA, 41 nt, synthetic construct
  source 1..41: mol_type = other RNA
acggaaggccatgccagtgagtatcccgttcagttcagagg

SEQ ID NO: 9777 - RNA, 43 nt, synthetic construct
  source 1..43: mol_type = other RNA
acggaaggccatgccagtgagcttcccgttcagtccccgcaga

SEQ ID NO: 9778 - RNA, 41 nt, synthetic construct
  source 1..41: mol_type = other RNA
tttggcccaaagatgattttgcccacagccttggcagcgcc

SEQ ID NO: 9779 - RNA, 41 nt, synthetic construct
  source 1..41: mol_type = other RNA
cagtgagcttcccactcagcaccgggatgaacttgcccaca

SEQ ID NO: 9780 - RNA, 41 nt, synthetic construct
  source 1..41: mol_type = other RNA
cagtgagcttcccactcagccccgggatgaacttgcccaca

SEQ ID NO: 9781 - RNA, 41 nt, synthetic construct
  source 1..41: mol_type = other RNA
cagtgagcttcccgtccagccccgggatgcccttgcccaca

SEQ ID NO: 9782 - RNA, 40 nt, synthetic construct
  source 1..40: mol_type = other RNA
tttagctcagggatgtcttgcccacagccttggcagcgcc

SEQ ID NO: 9783 - RNA, 41 nt, synthetic construct
  source 1..41: mol_type = other RNA
acggaaggccatgccagtgagcttcccgttcagccctgaga

SEQ ID NO: 9784 - RNA, 41 nt, synthetic construct
  source 1..41: mol_type = other RNA
ttcagccctgagatgacctagcccacagccttggcagcgcc

SEQ ID NO: 9785 - RNA, 41 nt, synthetic construct
  source 1..41: mol_type = other RNA
cagtgagcttcccattcagcccagggatccccttgcccaca

SEQ ID NO: 9786 - RNA, 37 nt, synthetic construct
  source 1..37: mol_type = other RNA
cagtgagcttcccagcccagggatgaccttgcccaca

SEQ ID NO: 9787 - RNA, 45 nt, synthetic construct
  source 1..45: mol_type = other RNA
cagtgagcttccccctcggctcagggcgacaagaccttgcccaca

SEQ ID NO: 9788 - RNA, 41 nt, synthetic construct
  source 1..41: mol_type = other RNA
acggaaggccatgccagtgagcctcccgttccgttcagggg

SEQ ID NO: 9789 - RNA, 41 nt, synthetic construct
  source 1..41: mol_type = other RNA
acggaaggccatgccagtgagcatcccgctcagttcaggga

SEQ ID NO: 9790 - RNA, 41 nt, synthetic construct
  source 1..41: mol_type = other RNA
acggaaggccatgccagtgagctaccgtttcaactgagggt

SEQ ID NO: 9791 - RNA, 41 nt, synthetic construct
  source 1..41: mol_type = other RNA
ttcagcccagggatgatcttgcccacagccttggcagcgcc

SEQ ID NO: 9792 - RNA, 41 nt, synthetic construct
  source 1..41: mol_type = other RNA
acggaaggccatgccagtgagcttcccgttcagctcaggga

SEQ ID NO: 9793 - RNA, 41 nt, synthetic construct
  source 1..41: mol_type = other RNA
acggaaggccatgccagtgagcttcccgttcagtccatcgt

SEQ ID NO: 9794 - RNA, 41 nt, synthetic construct
  source 1..41: mol_type = other RNA
ttcagcccagggatgcccttgcccacagccttggcagcgcc

SEQ ID NO: 9795 - RNA, 41 nt, synthetic construct
  source 1..41: mol_type = other RNA
ttcagtccagggatggccttacccacagccttggcagcgcc

SEQ ID NO: 9796 - RNA, 41 nt, synthetic construct
  source 1..41: mol_type = other RNA
cagtgagcttcccattcagctcaggcatgaccttgcccaca

SEQ ID NO: 9797 - RNA, 41 nt, synthetic construct
  source 1..41: mol_type = other RNA
cagtgagcttcccactgagctcaggcatgaccttgcccaca

SEQ ID NO: 9798 - RNA, 41 nt, synthetic construct
  source 1..41: mol_type = other RNA
acggaaggccatgccagtgagcgccccactgagcccaggca

SEQ ID NO: 9799 - RNA, 41 nt, synthetic construct
  source 1..41: mol_type = other RNA
tttagcccagggatgaccttccccacagccttggcagcgcc

SEQ ID NO: 9800 - RNA, 42 nt, synthetic construct
  source 1..42: mol_type = other RNA
cagtgagcttccaactctccttcagggatcaccttgcccaca

SEQ ID NO: 9801 - RNA, 41 nt, synthetic construct
  source 1..41: mol_type = other RNA
acggaaggccatgccagtgagtatcccgtcaagcccagtgc

SEQ ID NO: 9802 - RNA, 41 nt, synthetic construct
  source 1..41: mol_type = other RNA
cagtgagcttcccgtggctcagggaagtgatcttgcccaca

SEQ ID NO: 9803 - RNA, 41 nt, synthetic construct
  source 1..41: mol_type = other RNA
acggaaggccatgccagtgagaatgacgttcagttcaaggg

SEQ ID NO: 9804 - RNA, 44 nt, synthetic construct
  source 1..44: mol_type = other RNA
acggaaggccatgccagtgagcttccagttcagtaaaaatcata

SEQ ID NO: 9805 - RNA, 41 nt, synthetic construct
  source 1..41: mol_type = other RNA
ttccgcccagggatgaacttgcccacagccttggcagcgcc

SEQ ID NO: 9806 - RNA, 54 nt, synthetic construct
  source 1..54: mol_type = other RNA
cagtgagcttcctgttcattgagctatgaccacatcccttgtatcttgcccaca

SEQ ID NO: 9807 - RNA, 41 nt, synthetic construct
  source 1..41: mol_type = other RNA
ttcagccctgggatgacctttcccacagccttggcagcgcc

SEQ ID NO: 9808 - RNA, 41 nt, synthetic construct
  source 1..41: mol_type = other RNA
cagtgagcttcacgttgggtccagggttggccttgcccaca

SEQ ID NO: 9809 - RNA, 41 nt, synthetic construct
  source 1..41: mol_type = other RNA
acggaaggccatgccagtgagccccccgttaggctcaggtc

SEQ ID NO: 9810 - RNA, 41 nt, synthetic construct
  source 1..41: mol_type = other RNA
tcaagctcagggatgaccttgcccacagccttggcagcgcc

SEQ ID NO: 9811 - RNA, 40 nt, synthetic construct
  source 1..40: mol_type = other RNA
tttagttcagggatggactgcccacagccttggcagcgcc

SEQ ID NO: 9812 - RNA, 41 nt, synthetic construct
  source 1..41: mol_type = other RNA
cagtgagctttccgctcagttccgggatggacttgcccaca

SEQ ID NO: 9813 - RNA, 41 nt, synthetic construct
  source 1..41: mol_type = other RNA
ttcagccctgggatgaccttgcccacagccttggcagcgcc

SEQ ID NO: 9814 - RNA, 41 nt, synthetic construct
  source 1..41: mol_type = other RNA
cagtgagcttccggttcagctcgggggtgaccttgcccaca

SEQ ID NO: 9815 - RNA, 52 nt, synthetic construct
  source 1..52: mol_type = other RNA
acggaaggccatgccagtgagcttgtcccgttcaatgagctatgaccacttc

SEQ ID NO: 9816 - RNA, 41 nt, synthetic construct
  source 1..41: mol_type = other RNA
cagtgagcttctcgtttggctctgagatggtcttgcccaca

SEQ ID NO: 9817 - RNA, 41 nt, synthetic construct
  source 1..41: mol_type = other RNA
ttcgggttcacgattaccttgcccacagccttggcagcgcc

SEQ ID NO: 9818 - RNA, 42 nt, synthetic construct
  source 1..42: mol_type = other RNA
acggaaggccatgccagtgagctgtacgttcgggttcacgat

SEQ ID NO: 9819 - RNA, 41 nt, synthetic construct
  source 1..41: mol_type = other RNA
acggaaggccatgccagtgagagtcccagcaggctcaggga

SEQ ID NO: 9820 - RNA, 41 nt, synthetic construct
  source 1..41: mol_type = other RNA
acggaaggccatgccagtgaggctctcgttcagttctagga

SEQ ID NO: 9821 - RNA, 53 nt, synthetic construct
  source 1..53: mol_type = other RNA
cagtgagcttcccgctcggctcacacacacacacagggttgaacttgcccaca

SEQ ID NO: 9822 - RNA, 55 nt, synthetic construct
  source 1..55: mol_type = other RNA
ctcggcccacacacacacacagggttgaatttttgcccacagccttggcagcgcc

SEQ ID NO: 9823 - RNA, 43 nt, synthetic construct
  source 1..43: mol_type = other RNA
acggaaggccatgccagtgagcttcccgttacgctcaaaggga

SEQ ID NO: 9824 - RNA, 43 nt, synthetic construct
  source 1..43: mol_type = other RNA
acggaaggccatgccagtgagcttcccgttcagttcccgcaga

SEQ ID NO: 9825 - RNA, 43 nt, synthetic construct
  source 1..43: mol_type = other RNA
cagtgagcttcccgtttagtccccgcagatgaccttgcccaca

SEQ ID NO: 9826 - RNA, 42 nt, synthetic construct
  source 1..42: mol_type = other RNA
ttcagcccagagaccgaccttgcccacagccttggcagcgcc

SEQ ID NO: 9827 - RNA, 41 nt, synthetic construct
  source 1..41: mol_type = other RNA
cagtgagcttcccactcagctgaggcatgaacttgcccaca

SEQ ID NO: 9828 - RNA, 41 nt, synthetic construct
  source 1..41: mol_type = other RNA
acggaaggccatgccagtgagcgccccactgagctcaggca

SEQ ID NO: 9829 - RNA, 41 nt, synthetic construct
  source 1..41: mol_type = other RNA
tttagcccagggatgaccttgcccacagccttggcagcgcc

SEQ ID NO: 9830 - RNA, 41 nt, synthetic construct
  source 1..41: mol_type = other RNA
ttcagctcagggatccccttgcccacagccttggcagcgcc

SEQ ID NO: 9831 - RNA, 41 nt, synthetic construct
  source 1..41: mol_type = other RNA
cagtgagcttccgttacagttcagggctgcccttgcccaca

SEQ ID NO: 9832 - RNA, 41 nt, synthetic construct
  source 1..41: mol_type = other RNA
tttagcccagcgatgaccttgcccacagccttggcagcgcc

SEQ ID NO: 9833 - RNA, 41 nt, synthetic construct
  source 1..41: mol_type = other RNA
acggaaggccatgccagtgagcttcccgtccagtccatagc

SEQ ID NO: 9834 - RNA, 41 nt, synthetic construct
  source 1..41: mol_type = other RNA
acggaaggccatgccagtgagcgtcccgttcagcccaggcg

SEQ ID NO: 9835 - RNA, 41 nt, synthetic construct
  source 1..41: mol_type = other RNA
tttagtccaggtacggccttgcccacagccttggcagcgcc

SEQ ID NO: 9836 - RNA, 41 nt, synthetic construct
  source 1..41: mol_type = other RNA
acggaaggccatgccagtgagcggaccgttcagtccaggta

SEQ ID NO: 9837 - RNA, 41 nt, synthetic construct
  source 1..41: mol_type = other RNA
cagtgagctttccgctcagtcccgggatggacttgcccaca

SEQ ID NO: 9838 - RNA, 41 nt, synthetic construct
  source 1..41: mol_type = other RNA
cagtgagcttcaacgttagctcagggatccccttgcccaca

SEQ ID NO: 9839 - RNA, 40 nt, synthetic construct
  source 1..40: mol_type = other RNA
acggaaggccatgccagtgacctcccgttcagttcatggt

SEQ ID NO: 9840 - RNA, 41 nt, synthetic construct
  source 1..41: mol_type = other RNA
acggaaggccatgccagtgagcatcccgtcaagtccagggt

SEQ ID NO: 9841 - RNA, 41 nt, synthetic construct
  source 1..41: mol_type = other RNA
ctcagttcaggaatggacttgcccacagccttggcagcgcc

SEQ ID NO: 9842 - RNA, 49 nt, synthetic construct
  source 1..49: mol_type = other RNA
cagtgagcttcccagcaggcccagggatgtctcctgcatcttgcccaca

SEQ ID NO: 9843 - RNA, 41 nt, synthetic construct
  source 1..41: mol_type = other RNA
cagtgagcttgccgctcagctgtgggatgaccttgcccaca

SEQ ID NO: 9844 - RNA, 37 nt, synthetic construct
  source 1..37: mol_type = other RNA
acggaaggccatgccagtgatttaattcagcccgggc

SEQ ID NO: 9845 - RNA, 41 nt, synthetic construct
  source 1..41: mol_type = other RNA
ttctgctcagggatgaccttgcccacagccttggcagcgcc

SEQ ID NO: 9846 - RNA, 41 nt, synthetic construct
  source 1..41: mol_type = other RNA
acggaaggccatgccagtgagcttcccgttcagcccagggc

SEQ ID NO: 9847 - RNA, 41 nt, synthetic construct
  source 1..41: mol_type = other RNA
ttcagctgaaggatgattttgcccacagccttggcagcgcc

SEQ ID NO: 9848 - RNA, 41 nt, synthetic construct
  source 1..41: mol_type = other RNA
acggaaggccatgccagtgagcttcccactcagctgaggca

SEQ ID NO: 9849 - RNA, 41 nt, synthetic construct
  source 1..41: mol_type = other RNA
acggaaggccatgccagtgaccttcccattctgctcagggc

SEQ ID NO: 9850 - RNA, 41 nt, synthetic construct
  source 1..41: mol_type = other RNA
cagtgagcttcccgttaagctccggcatgaccttgcccaca

SEQ ID NO: 9851 - RNA, 42 nt, synthetic construct
  source 1..42: mol_type = other RNA
cagtgagcttcccgctaagctccgggatgtaccttgcccaca

SEQ ID NO: 9852 - RNA, 41 nt, synthetic construct
  source 1..41: mol_type = other RNA
tccagccccgggatgcccttgcccacagccttggcagcgcc

SEQ ID NO: 9853 - RNA, 41 nt, synthetic construct
  source 1..41: mol_type = other RNA
acggaaggccatgccagtgagtatcccgttcagtccagagg

SEQ ID NO: 9854 - RNA, 39 nt, synthetic construct
  source 1..39: mol_type = other RNA
acggaaggccatgccagtgatttccgttcagcccaggga

SEQ ID NO: 9855 - RNA, 42 nt, synthetic construct
  source 1..42: mol_type = other RNA
cagtgagcttcctactctcctccagggatcaccttgcccaca

SEQ ID NO: 9856 - RNA, 41 nt, synthetic construct
  source 1..41: mol_type = other RNA
ttcagcccagggatccccttgcccacagccttggcagcgcc

SEQ ID NO: 9857 - RNA, 41 nt, synthetic construct
  source 1..41: mol_type = other RNA
acggaaggccatgccagtgagcgtcccgttcagtttagggc

SEQ ID NO: 9858 - RNA, 41 nt, synthetic construct
  source 1..41: mol_type = other RNA
tttacctcagggttgactttgcccacagccttggcagcgcc

SEQ ID NO: 9859 - RNA, 41 nt, synthetic construct
  source 1..41: mol_type = other RNA
tttaccccagggttgactttgcccacagccttggcagcgcc

SEQ ID NO: 9860 - RNA, 42 nt, synthetic construct
  source 1..42: mol_type = other RNA
ttctgggttcaaggataccttgcccacagccttggcagcgcc

SEQ ID NO: 9861 - RNA, 42 nt, synthetic construct
  source 1..42: mol_type = other RNA
acggaaggccatgccagtgagctaccattctgggtccaagga

SEQ ID NO: 9862 - RNA, 41 nt, synthetic construct
  source 1..41: mol_type = other RNA
ttaagccgagggatgaccatgcccacagccttggcagcgcc

SEQ ID NO: 9863 - RNA, 41 nt, synthetic construct
  source 1..41: mol_type = other RNA
acggaaggccatgccagtgagcatcccgctcagtccaggga

SEQ ID NO: 9864 - RNA, 42 nt, synthetic construct
  source 1..42: mol_type = other RNA
acggaaggccatgccagtgagctgaacgttcgggttcaagac

SEQ ID NO: 9865 - RNA, 41 nt, synthetic construct
  source 1..41: mol_type = other RNA
cagtgagctttcattccagggtcgaggataccttgcccaca

SEQ ID NO: 9866 - RNA, 41 nt, synthetic construct
  source 1..41: mol_type = other RNA
acggaaggccatgccagtgaacgtcacgttgggtccagggt

SEQ ID NO: 9867 - RNA, 41 nt, synthetic construct
  source 1..41: mol_type = other RNA
tttagctcagggatgaccttccccacagccttggcagcgcc

SEQ ID NO: 9868 - RNA, 41 nt, synthetic construct
  source 1..41: mol_type = other RNA
ttcagctcagggatgattttgcccacagccttggcagcgcc

SEQ ID NO: 9869 - RNA, 41 nt, synthetic construct
  source 1..41: mol_type = other RNA
tctagctcagggatgaccttgcccacagccttggcagcgcc

SEQ ID NO: 9870 - RNA, 41 nt, synthetic construct
  source 1..41: mol_type = other RNA
acggaaggccatgccagtgagcttcccgttcagccgaagga

SEQ ID NO: 9871 - RNA, 41 nt, synthetic construct
  source 1..41: mol_type = other RNA
cagtgagcttcccgttcagccccgggatgagcttgcccaca

SEQ ID NO: 9872 - RNA, 41 nt, synthetic construct
  source 1..41: mol_type = other RNA
ttctgcccagggctgaccttgcccacagccttggcagcgcc

SEQ ID NO: 9873 - RNA, 41 nt, synthetic construct
  source 1..41: mol_type = other RNA
cagtgagcttcccgtccagctccgggatgcccttgcccaca

SEQ ID NO: 9874 - RNA, 41 nt, synthetic construct
  source 1..41: mol_type = other RNA
tttggcccaagactggcgttgcccacagccttggcagcgcc

SEQ ID NO: 9875 - RNA, 41 nt, synthetic construct
  source 1..41: mol_type = other RNA
ttcagttcagaggtgaccttgcccacagccttggcagcgcc

SEQ ID NO: 9876 - RNA, 41 nt, synthetic construct
  source 1..41: mol_type = other RNA
ttcagtccaggggtgactttgcccacagccttggcagcgcc

SEQ ID NO: 9877 - RNA, 41 nt, synthetic construct
  source 1..41: mol_type = other RNA
acggaaggccatgccagtgagcttcccgttcgctccaagga

SEQ ID NO: 9878 - RNA, 41 nt, synthetic construct
  source 1..41: mol_type = other RNA
cagtgagcttcccgttcgctccaaggatgaacttgcccaca

SEQ ID NO: 9879 - RNA, 41 nt, synthetic construct
  source 1..41: mol_type = other RNA
ttccgcccagggatgaccttgcccacagccttggcagcgcc

SEQ ID NO: 9880 - RNA, 41 nt, synthetic construct
  source 1..41: mol_type = other RNA
acggaaggccatgccagtgagcctcccgttccgtccagggg

SEQ ID NO: 9881 - RNA, 40 nt, synthetic construct
  source 1..40: mol_type = other RNA
tttagtccagggatggactgcccacagccttggcagcgcc

SEQ ID NO: 9882 - RNA, 44 nt, synthetic construct
  source 1..44: mol_type = other RNA
acggaaggccatgccagtgagcttccagttcagtaaaaaccata

SEQ ID NO: 9883 - RNA, 41 nt, synthetic construct
  source 1..41: mol_type = other RNA
acggaaggccatgccagtgagcgttccgctcagtcccggga

SEQ ID NO: 9884 - RNA, 41 nt, synthetic construct
  source 1..41: mol_type = other RNA
acggaaggccatgccagtgaggttctcgtttggccctgaga

SEQ ID NO: 9885 - RNA, 41 nt, synthetic construct
  source 1..41: mol_type = other RNA
acggaaggccatgccagtgaggttctcgtttggctctgaga

SEQ ID NO: 9886 - RNA, 41 nt, synthetic construct
  source 1..41: mol_type = other RNA
acggaaggccatgccagtgagcttccggttcagctcgggga

SEQ ID NO: 9887 - RNA, 41 nt, synthetic construct
  source 1..41: mol_type = other RNA
ttcagctcgggggtgaccacgcccacagccttggcagcgcc

SEQ ID NO: 9888 - RNA, 42 nt, synthetic construct
  source 1..42: mol_type = other RNA
cagtgagcttcacgttcagtttgaggatgcatcttgcccaca

SEQ ID NO: 9889 - RNA, 41 nt, synthetic construct
  source 1..41: mol_type = other RNA
cagtgagctttcattctgggttcaaggataccttgcccaca

SEQ ID NO: 9890 - RNA, 41 nt, synthetic construct
  source 1..41: mol_type = other RNA
cagtgagctttcattctgggtccaaggataccttgcccaca

SEQ ID NO: 9891 - RNA, 41 nt, synthetic construct
  source 1..41: mol_type = other RNA
cagtgagcttcccgttcggcccagggatgatcttgcccaca

SEQ ID NO: 9892 - RNA, 41 nt, synthetic construct
  source 1..41: mol_type = other RNA
acggaaggccatgccagtgagcttccggttcagcatcggaa

SEQ ID NO: 9893 - RNA, 52 nt, synthetic construct
  source 1..52: mol_type = other RNA
acggaaggccatgccagtgagcttgtcccgttcattgagctatgaccacttc

SEQ ID NO: 9894 - RNA, 43 nt, synthetic construct
  source 1..43: mol_type = other RNA
acggaaggccatgccagtgagtttcccggattggtcataggga

SEQ ID NO: 9895 - RNA, 42 nt, synthetic construct
  source 1..42: mol_type = other RNA
ttcagctcagggatgccccttgcccacagccttggcagcgcc

SEQ ID NO: 9896 - RNA, 41 nt, synthetic construct
  source 1..41: mol_type = other RNA
cagtgagctttacgttcgggttcacgattaccttgcccaca

SEQ ID NO: 9897 - RNA, 41 nt, synthetic construct
  source 1..41: mol_type = other RNA
acggaaggccatgccagtgagcatcccgctcagttcaggaa

SEQ ID NO: 9898 - RNA, 41 nt, synthetic construct
  source 1..41: mol_type = other RNA
acggaaggccatgccagtgagattctcttacagctcaggca

SEQ ID NO: 9899 - RNA, 41 nt, synthetic construct
  source 1..41: mol_type = other RNA
acggaaggccatgccagtgaacgtcacgttgggttcagggt

SEQ ID NO: 9900 - RNA, 41 nt, synthetic construct
  source 1..41: mol_type = other RNA
ttcagctcagcgatgaccttgcccacagccttggcagcgcc

SEQ ID NO: 9901 - RNA, 41 nt, synthetic construct
  source 1..41: mol_type = other RNA
tctagcccagggatgaccttgcccacagccttggcagcgcc

SEQ ID NO: 9902 - RNA, 43 nt, synthetic construct
  source 1..43: mol_type = other RNA
tttagtccccgcagatgacttggcccacagccttggcagcgcc

SEQ ID NO: 9903 - RNA, 42 nt, synthetic construct
  source 1..42: mol_type = other RNA
ttcagctcagagaccgaccttgcccacagccttggcagcgcc

SEQ ID NO: 9904 - RNA, 41 nt, synthetic construct
  source 1..41: mol_type = other RNA
ttcagcctagttatgaccttgcccacagccttggcagcgcc

SEQ ID NO: 9905 - RNA, 41 nt, synthetic construct
  source 1..41: mol_type = other RNA
ctcagccgaggcatgaacttgcccacagccttggcagcgcc

SEQ ID NO: 9906 - RNA, 39 nt, synthetic construct
  source 1..39: mol_type = other RNA
tagcccagggatgatcttgcccacagccttggcagcgcc

SEQ ID NO: 9907 - RNA, 41 nt, synthetic construct
  source 1..41: mol_type = other RNA
tttgacccaggaatgaccttgcccacagccttggcagcgcc

SEQ ID NO: 9908 - RNA, 41 nt, synthetic construct
  source 1..41: mol_type = other RNA
ttcagcccagggatgtccttacccacagccttggcagcgcc

SEQ ID NO: 9909 - RNA, 40 nt, synthetic construct
  source 1..40: mol_type = other RNA
tttagcccagggatgtcttgcccacagccttggcagcgcc

SEQ ID NO: 9910 - RNA, 42 nt, synthetic construct
  source 1..42: mol_type = other RNA
ttcagcccagggatgcatcttgcccacagccttggcagcgcc

SEQ ID NO: 9911 - RNA, 41 nt, synthetic construct
  source 1..41: mol_type = other RNA
acggaaggccatgccagtgagcgtcacgtccagttgaggga

SEQ ID NO: 9912 - RNA, 41 nt, synthetic construct
  source 1..41: mol_type = other RNA
ttcagttcaggggtgactttgcccacagccttggcagcgcc

SEQ ID NO: 9913 - RNA, 41 nt, synthetic construct
  source 1..41: mol_type = other RNA
acggaaggccatgccagtgagcctcccgttcagtccagggg

SEQ ID NO: 9914 - RNA, 42 nt, synthetic construct
  source 1..42: mol_type = other RNA
ttcgcttcaaggatgaagtttccccacagccttggcagcgcc

SEQ ID NO: 9915 - RNA, 41 nt, synthetic construct
  source 1..41: mol_type = other RNA
acggaaggccatgccagtgagtatcccgtcaagctcagtgc

SEQ ID NO: 9916 - RNA, 42 nt, synthetic construct
  source 1..42: mol_type = other RNA
ttacagtccagggctgccctggcccacagccttggcagcgcc

SEQ ID NO: 9917 - RNA, 45 nt, synthetic construct
  source 1..45: mol_type = other RNA
ctcggcccagggcgacaagaccttgcccacagccttggcagcgcc

SEQ ID NO: 9918 - RNA, 41 nt, synthetic construct
  source 1..41: mol_type = other RNA
tttagctcagcgatgaccttgcccacagccttggcagcgcc

SEQ ID NO: 9919 - RNA, 41 nt, synthetic construct
  source 1..41: mol_type = other RNA
tggctcagggaagtgatcttgcccacagccttggcagcgcc

SEQ ID NO: 9920 - RNA, 41 nt, synthetic construct
  source 1..41: mol_type = other RNA
ttctggttcaaggataccttgcccacagccttggcagcgcc

SEQ ID NO: 9921 - RNA, 41 nt, synthetic construct
  source 1..41: mol_type = other RNA
cagtgagcttcccgttcagtttagggctggccttgcccaca

SEQ ID NO: 9922 - RNA, 41 nt, synthetic construct
  source 1..41: mol_type = other RNA
ttacgctcagggaacaccttgcccacagccttggcagcgcc

SEQ ID NO: 9923 - RNA, 41 nt, synthetic construct
  source 1..41: mol_type = other RNA
ttacgcccagggaacaccttgcccacagccttggcagcgcc

SEQ ID NO: 9924 - RNA, 45 nt, synthetic construct
  source 1..45: mol_type = other RNA
cagtgagcttcccgttcaggtcagcagaaaatgatcttgcccaca

SEQ ID NO: 9925 - RNA, 41 nt, synthetic construct
  source 1..41: mol_type = other RNA
gttagctcagggatgaccttgcccacagccttggcagcgcc

SEQ ID NO: 9926 - RNA, 54 nt, synthetic construct
  source 1..54: mol_type = other RNA
cagtgagcttcctgttcattgagctatgatcacttcccttgtatcttgcccaca

SEQ ID NO: 9927 - RNA, 41 nt, synthetic construct
  source 1..41: mol_type = other RNA
ttcgggtccaaggataccttgcccacagccttggcagcgcc

SEQ ID NO: 9928 - RNA, 41 nt, synthetic construct
  source 1..41: mol_type = other RNA
tttggctctgagatggtcttgcccacagccttggcagcgcc

SEQ ID NO: 9929 - RNA, 43 nt, synthetic construct
  source 1..43: mol_type = other RNA
gttggcccagggggaagaccgtgcccacagccttggcagcgcc

SEQ ID NO: 9930 - RNA, 41 nt, synthetic construct
  source 1..41: mol_type = other RNA
acggaaggccatgccagtgaccttcccgttcagcccaggga

SEQ ID NO: 9931 - RNA, 41 nt, synthetic construct
  source 1..41: mol_type = other RNA
acggaaggccatgccagtgagcatcccgctcagtccaggaa

SEQ ID NO: 9932 - RNA, 41 nt, synthetic construct
  source 1..41: mol_type = other RNA
cagtgagcttctcttacagctcaggcatgatcttgcccaca

SEQ ID NO: 9933 - RNA, 42 nt, synthetic construct
  source 1..42: mol_type = other RNA
ttacagctcaggcatgatcttacccacagccttggcagcgcc

SEQ ID NO: 9934 - RNA, 42 nt, synthetic construct
  source 1..42: mol_type = other RNA
acggaaggccatgccagtgagctgccattccagggtcgagga

SEQ ID NO: 9935 - RNA, 55 nt, synthetic construct
  source 1..55: mol_type = other RNA
ctcggctcacacacacacacagggttgaatttttgcccacagccttggcagcgcc

SEQ ID NO: 9936 - RNA, 41 nt, synthetic construct
  source 1..41: mol_type = other RNA
cagtgagcttgccgctcagccgtgggatgaccttgcccaca

SEQ ID NO: 9937 - RNA, 40 nt, synthetic construct
  source 1..40: mol_type = other RNA
ttgggttcagggttggccttcccacagccttggcagcgcc

SEQ ID NO: 9938 - RNA, 45 nt, synthetic construct
  source 1..45: mol_type = other RNA
ttcagccaagggatgccgccgcttgcccacagccttggcagcgcc

SEQ ID NO: 9939 - RNA, 41 nt, synthetic construct
  source 1..41: mol_type = other RNA
ttcagcccagggatgattttgcccacagccttggcagcgcc

SEQ ID NO: 9940 - RNA, 46 nt, synthetic construct
  source 1..46: mol_type = other RNA
ttacgctcaaagggatgacgagtttgcccacagccttggcagcgcc

SEQ ID NO: 9941 - RNA, 41 nt, synthetic construct
  source 1..41: mol_type = other RNA
ttcagccgaaggatgattttgcccacagccttggcagcgcc

SEQ ID NO: 9942 - RNA, 43 nt, synthetic construct
  source 1..43: mol_type = other RNA
tttagttcccgcagatgacttggcccacagccttggcagcgcc

SEQ ID NO: 9943 - RNA, 41 nt, synthetic construct
  source 1..41: mol_type = other RNA
ttcagctcagggatgcccttgcccacagccttggcagcgcc

SEQ ID NO: 9944 - RNA, 41 nt, synthetic construct
  source 1..41: mol_type = other RNA
tttggctcaaagatgattttgcccacagccttggcagcgcc

SEQ ID NO: 9945 - RNA, 41 nt, synthetic construct
  source 1..41: mol_type = other RNA
ttaagcccaaggatgaaattgcccacagccttggcagcgcc

SEQ ID NO: 9946 - RNA, 42 nt, synthetic construct
  source 1..42: mol_type = other RNA
cagtgagcttcccgctaagccccgggatgtaccttgcccaca

SEQ ID NO: 9947 - RNA, 41 nt, synthetic construct
  source 1..41: mol_type = other RNA
ctcagcaccgggatgaacttccccacagccttggcagcgcc

SEQ ID NO: 9948 - RNA, 41 nt, synthetic construct
  source 1..41: mol_type = other RNA
ctcagccccgggatgaacttccccacagccttggcagcgcc

SEQ ID NO: 9949 - RNA, 42 nt, synthetic construct
  source 1..42: mol_type = other RNA
ttcagctcagggatgcatcttgcccacagccttggcagcgcc

SEQ ID NO: 9950 - RNA, 41 nt, synthetic construct
  source 1..41: mol_type = other RNA
ttcggttcagggctgaccttgcccacagccttggcagcgcc

SEQ ID NO: 9951 - RNA, 43 nt, synthetic construct
  source 1..43: mol_type = other RNA
actctcctccagggatcaccttgcccacagccttggcagcgcc

SEQ ID NO: 9952 - RNA, 41 nt, synthetic construct
  source 1..41: mol_type = other RNA
cagtgagcttcccgtttagttcagggatgaccttgcccaca

SEQ ID NO: 9953 - RNA, 41 nt, synthetic construct
  source 1..41: mol_type = other RNA
tcaagctcagtgctgaccttgcccacagccttggcagcgcc

SEQ ID NO: 9954 - RNA, 41 nt, synthetic construct
  source 1..41: mol_type = other RNA
acggaaggccatgccagtgagcttccgttacagtccagggc

SEQ ID NO: 9955 - RNA, 42 nt, synthetic construct
  source 1..42: mol_type = other RNA
ttacagttcagggctgccctggcccacagccttggcagcgcc

SEQ ID NO: 9956 - RNA, 41 nt, synthetic construct
  source 1..41: mol_type = other RNA
cagtgagcttccgttacagtccagggctgcccttgcccaca

SEQ ID NO: 9957 - RNA, 37 nt, synthetic construct
  source 1..37: mol_type = other RNA
gcccagggatgaccttgcccacagccttggcagcgcc

SEQ ID NO: 9958 - RNA, 41 nt, synthetic construct
  source 1..41: mol_type = other RNA
ttcagcccagggatgagcttgcccacagccttggcagcgcc

SEQ ID NO: 9959 - RNA, 41 nt, synthetic construct
  source 1..41: mol_type = other RNA
acggaaggccatgccagtgagaatgacgttcagtccaaggg

SEQ ID NO: 9960 - RNA, 41 nt, synthetic construct
  source 1..41: mol_type = other RNA
tttcgttcaggggtgactttgcccacagccttggcagcgcc

SEQ ID NO: 9961 - RNA, 37 nt, synthetic construct
  source 1..37: mol_type = other RNA
ttaagcccagggatgaacccacagccttggcagcgcc

SEQ ID NO: 9962 - RNA, 41 nt, synthetic construct
  source 1..41: mol_type = other RNA
ttacgccaagggatgaccgtgcccacagccttggcagcgcc

SEQ ID NO: 9963 - RNA, 41 nt, synthetic construct
  source 1..41: mol_type = other RNA
ttcagcccagagatgaccttgcccacagccttggcagcgcc

SEQ ID NO: 9964 - RNA, 43 nt, synthetic construct
  source 1..43: mol_type = other RNA
ttcagctcagagggacgaccttgcccacagccttggcagcgcc

SEQ ID NO: 9965 - RNA, 41 nt, synthetic construct
  source 1..41: mol_type = other RNA
cagtgagcttcccatacgatccagggatggccttgcccaca

SEQ ID NO: 9966 - RNA, 41 nt, synthetic construct
  source 1..41: mol_type = other RNA
acggaaggccatgccagtgagcgttccgctcagttccggga

SEQ ID NO: 9967 - RNA, 45 nt, synthetic construct
  source 1..45: mol_type = other RNA
acggaaggccatgccagtgagctacccgttcaggtcagcagaaaa

SEQ ID NO: 9968 - RNA, 41 nt, synthetic construct
  source 1..41: mol_type = other RNA
ttcagcccgggggtgaccacgcccacagccttggcagcgcc

SEQ ID NO: 9969 - RNA, 41 nt, synthetic construct
  source 1..41: mol_type = other RNA
tttagcccagggagctccttgcccacagccttggcagcgcc

SEQ ID NO: 9970 - RNA, 41 nt, synthetic construct
  source 1..41: mol_type = other RNA
tttagctcagggagctccttgcccacagccttggcagcgcc

SEQ ID NO: 9971 - RNA, 54 nt, synthetic construct
  source 1..54: mol_type = other RNA
ttcaatgagctatgaccacttcccttgtatttgacccacagccttggcagcgcc

SEQ ID NO: 9972 - RNA, 42 nt, synthetic construct
  source 1..42: mol_type = other RNA
cagtgagcttcacgttcagtttgtggatgcatcttgcccaca

SEQ ID NO: 9973 - RNA, 41 nt, synthetic construct
  source 1..41: mol_type = other RNA
ctcagttcagggatggaattgcccacagccttggcagcgcc

SEQ ID NO: 9974 - RNA, 41 nt, synthetic construct
  source 1..41: mol_type = other RNA
ctcagtccagggatggaattgcccacagccttggcagcgcc

SEQ ID NO: 9975 - RNA, 41 nt, synthetic construct
  source 1..41: mol_type = other RNA
acggaaggccatgccagtgagctccccgttaagctccggca

SEQ ID NO: 9976 - RNA, 41 nt, synthetic construct
  source 1..41: mol_type = other RNA
ttcgggtccacgattaccttgcccacagccttggcagcgcc

SEQ ID NO: 9977 - RNA, 41 nt, synthetic construct
  source 1..41: mol_type = other RNA
cagtgagctttacgttcgggtccacgattaccttgcccaca

SEQ ID NO: 9978 - RNA, 41 nt, synthetic construct
  source 1..41: mol_type = other RNA
ctcagtccaggaatggacttgcccacagccttggcagcgcc

SEQ ID NO: 9979 - RNA, 42 nt, synthetic construct
  source 1..42: mol_type = other RNA
ttccagggtcgaggataccttgcccacagccttggcagcgcc

SEQ ID NO: 9980 - RNA, 41 nt, synthetic construct
  source 1..41: mol_type = other RNA
cagtgagctttcattccagggccgaggataccttgcccaca

SEQ ID NO: 9981 - RNA, 41 nt, synthetic construct
  source 1..41: mol_type = other RNA
ttcagtcctaggattattttgcccacagccttggcagcgcc

SEQ ID NO: 9982 - RNA, 55 nt, synthetic construct
  source 1..55: mol_type = other RNA
ctcagctgtgggatgactaaaaaaattctaccttacccacagccttggcagcgcc

SEQ ID NO: 9983 - RNA, 42 nt, synthetic construct
  source 1..42: mol_type = other RNA
acggaaggccatgccagtgagcgttgccgctcagctgtggga

SEQ ID NO: 9984 - RNA, 40 nt, synthetic construct
  source 1..40: mol_type = other RNA
ttaggctcaggtcgacttagcccacagccttggcagcgcc

SEQ ID NO: 9985 - RNA, 41 nt, synthetic construct
  source 1..41: mol_type = other RNA
tttagtccatcgttggccttgcccacagccttggcagcgcc

SEQ ID NO: 9986 - RNA, 41 nt, synthetic construct
  source 1..41: mol_type = other RNA
tttagttcatcgttggccttgcccacagccttggcagcgcc

SEQ ID NO: 9987 - RNA, 41 nt, synthetic construct
  source 1..41: mol_type = other RNA
ttcagctcagggatgaccttgcccacagccttggcagcgcc

SEQ ID NO: 9988 - RNA, 46 nt, synthetic construct
  source 1..46: mol_type = other RNA
ttcagcccaagggatgccgccgcttgcccacagccttggcagcgcc

SEQ ID NO: 9989 - RNA, 41 nt, synthetic construct
  source 1..41: mol_type = other RNA
tttagcccagggctgactttgcccacagccttggcagcgcc

SEQ ID NO: 9990 - RNA, 41 nt, synthetic construct
  source 1..41: mol_type = other RNA
ttcagctcaggggagacaacgcccacagccttggcagcgcc

SEQ ID NO: 9991 - RNA, 41 nt, synthetic construct
  source 1..41: mol_type = other RNA
acggaaggccatgccagtgagtatcccgttcagctcacaga

SEQ ID NO: 9992 - RNA, 41 nt, synthetic construct
  source 1..41: mol_type = other RNA
ttcagctcacagatgaccttgcccacagccttggcagcgcc

SEQ ID NO: 9993 - RNA, 41 nt, synthetic construct
  source 1..41: mol_type = other RNA
acggaaggccatgccagtgagtatcccgttcagcccacaga

SEQ ID NO: 9994 - RNA, 46 nt, synthetic construct
  source 1..46: mol_type = other RNA
ttacgcccaaagggatgacgagtttgcccacagccttggcagcgcc

SEQ ID NO: 9995 - RNA, 41 nt, synthetic construct
  source 1..41: mol_type = other RNA
tatcgctcagggatgaccttacccacagccttggcagcgcc

SEQ ID NO: 9996 - RNA, 41 nt, synthetic construct
  source 1..41: mol_type = other RNA
tatcgcccagggatgaccttacccacagccttggcagcgcc

SEQ ID NO: 9997 - RNA, 41 nt, synthetic construct
  source 1..41: mol_type = other RNA
ttcagccccgggatgagcttgcccacagccttggcagcgcc

SEQ ID NO: 9998 - RNA, 41 nt, synthetic construct
  source 1..41: mol_type = other RNA
ttttgccaagggatgaccttgcccacagccttggcagcgcc

SEQ ID NO: 9999 - RNA, 41 nt, synthetic construct
  source 1..41: mol_type = other RNA
cagtgagcttcccgttcagcctagttatgaccttgcccaca

SEQ ID NO: 10000 - RNA, 42 nt, synthetic construct
  source 1..42: mol_type = other RNA
ctaagctccgggatgtaccttgcccacagccttggcagcgcc

SEQ ID NO: 10001 - RNA, 41 nt, synthetic construct
  source 1..41: mol_type = other RNA
acggaaggccatgccagtgagcttcccgctaagccccggga

SEQ ID NO: 10002 - RNA, 42 nt, synthetic construct
  source 1..42: mol_type = other RNA
ctaagccccgggatgtaccttgcccacagccttggcagcgcc

SEQ ID NO: 10003 - RNA, 41 nt, synthetic construct
  source 1..41: mol_type = other RNA
ttcagctcagggatgtccttacccacagccttggcagcgcc

SEQ ID NO: 10004 - RNA, 41 nt, synthetic construct
  source 1..41: mol_type = other RNA
tttggctcaagactggcgttgcccacagccttggcagcgcc

SEQ ID NO: 10005 - RNA, 41 nt, synthetic construct
  source 1..41: mol_type = other RNA
ttcagtccagaggtgaccttgcccacagccttggcagcgcc

SEQ ID NO: 10006 - RNA, 41 nt, synthetic construct
  source 1..41: mol_type = other RNA
tttagctcagggatgaccttgcccacagccttggcagcgcc

SEQ ID NO: 10007 - RNA, 41 nt, synthetic construct
  source 1..41: mol_type = other RNA
ttcggtccagggctgaccttgcccacagccttggcagcgcc

SEQ ID NO: 10008 - RNA, 41 nt, synthetic construct
  source 1..41: mol_type = other RNA
tccagtccatagctggccttgcccacagccttggcagcgcc

SEQ ID NO: 10009 - RNA, 41 nt, synthetic construct
  source 1..41: mol_type = other RNA
acggaaggccatgccagtgagcgtcccgttcagtctagggc

SEQ ID NO: 10010 - RNA, 41 nt, synthetic construct
  source 1..41: mol_type = other RNA
ttacgctaagggatgaccgtgcccacagccttggcagcgcc

SEQ ID NO: 10011 - RNA, 43 nt, synthetic construct
  source 1..43: mol_type = other RNA
tacgattcagggatggctctttgcccacagccttggcagcgcc

SEQ ID NO: 10012 - RNA, 45 nt, synthetic construct
  source 1..45: mol_type = other RNA
cagtgagcttcccgttcaggccagcagaaaatgatcttgcccaca

SEQ ID NO: 10013 - RNA, 45 nt, synthetic construct
  source 1..45: mol_type = other RNA
acggaaggccatgccagtgagctacccgttcaggccagcagaaaa

SEQ ID NO: 10014 - RNA, 45 nt, synthetic construct
  source 1..45: mol_type = other RNA
ttcaggccagcagaaaatgatcttgcccacagccttggcagcgcc

SEQ ID NO: 10015 - RNA, 52 nt, synthetic construct
  source 1..52: mol_type = other RNA
acggaaggccatgccagtgagcttgtcccgttcattgagctatgatcacttc

SEQ ID NO: 10016 - RNA, 54 nt, synthetic construct
  source 1..54: mol_type = other RNA
ttcattgagctatgatcacttcccttgtatttgacccacagccttggcagcgcc

SEQ ID NO: 10017 - RNA, 42 nt, synthetic construct
  source 1..42: mol_type = other RNA
ttcagtttgaggatgcatcttgcccacagccttggcagcgcc

SEQ ID NO: 10018 - RNA, 41 nt, synthetic construct
  source 1..41: mol_type = other RNA
ttcgggttcaaggataccttgcccacagccttggcagcgcc

SEQ ID NO: 10019 - RNA, 42 nt, synthetic construct
  source 1..42: mol_type = other RNA
ttcagtttgtggatgcatcttgcccacagccttggcagcgcc

SEQ ID NO: 10020 - RNA, 41 nt, synthetic construct
  source 1..41: mol_type = other RNA
acggaaggccatgccagtgagtttcacgttcagtttgagga

SEQ ID NO: 10021 - RNA, 42 nt, synthetic construct
  source 1..42: mol_type = other RNA
cagtgagcttcacgttcagtctgtggatgcatcttgcccaca

SEQ ID NO: 10022 - RNA, 41 nt, synthetic construct
  source 1..41: mol_type = other RNA
ttcggcccagggatgatcttgcccacagccttggcagcgcc

SEQ ID NO: 10023 - RNA, 54 nt, synthetic construct
  source 1..54: mol_type = other RNA
cagtgagcttcctgttcattgagctatgaccacttcccttgtatcttgcccaca

SEQ ID NO: 10024 - RNA, 54 nt, synthetic construct
  source 1..54: mol_type = other RNA
ttcattgagctatgatcacatcccttgtatttgacccacagccttggcagcgcc

SEQ ID NO: 10025 - RNA, 54 nt, synthetic construct
  source 1..54: mol_type = other RNA
ttcattgagctatgaccacttcccttgtatttgacccacagccttggcagcgcc

SEQ ID NO: 10026 - RNA, 43 nt, synthetic construct
  source 1..43: mol_type = other RNA
cagtgagcttcccggattggtaatagggatgtacttgcccaca

SEQ ID NO: 10027 - RNA, 42 nt, synthetic construct
  source 1..42: mol_type = other RNA
ttcagcccagggatgccccttgcccacagccttggcagcgcc

SEQ ID NO: 10028 - RNA, 41 nt, synthetic construct
  source 1..41: mol_type = other RNA
acggaaggccatgccagtgagctccccgttaagccccggca

SEQ ID NO: 10029 - RNA, 40 nt, synthetic construct
  source 1..40: mol_type = other RNA
acggaaggccatgccagtgacctcccgttcagtccatggt

SEQ ID NO: 10030 - RNA, 42 nt, synthetic construct
  source 1..42: mol_type = other RNA
acggaaggccatgccagtgagctgaacgttcgggtccaagac

SEQ ID NO: 10031 - RNA, 41 nt, synthetic construct
  source 1..41: mol_type = other RNA
ttcgggtccaagactaccttgcccacagccttggcagcgcc

SEQ ID NO: 10032 - RNA, 42 nt, synthetic construct
  source 1..42: mol_type = other RNA
acggaaggccatgccagtgagctgtacgttcgggtccacgat

SEQ ID NO: 10033 - RNA, 39 nt, synthetic construct
  source 1..39: mol_type = other RNA
ttcaactgagggtaccttccccacagccttggcagcgcc

SEQ ID NO: 10034 - RNA, 49 nt, synthetic construct
  source 1..49: mol_type = other RNA
gcaggctcagggatgtctcctgcatcttgcccacagccttggcagcgcc

SEQ ID NO: 10035 - RNA, 41 nt, synthetic construct
  source 1..41: mol_type = other RNA
cagtgagcttctcgttcagtcctaggattatcttgcccaca

SEQ ID NO: 10036 - RNA, 41 nt, synthetic construct
  source 1..41: mol_type = other RNA
ttcagttctaggattattttgcccacagccttggcagcgcc

SEQ ID NO: 10037 - RNA, 41 nt, synthetic construct
  source 1..41: mol_type = other RNA
acggaaggccatgccagtgaggctctcgttcagtcctagga

SEQ ID NO: 10038 - RNA, 41 nt, synthetic construct
  source 1..41: mol_type = other RNA
tttagcccaggggtcacctcgcccacagccttggcagcgcc

SEQ ID NO: 10039 - RNA, 48 nt, synthetic construct
  source 1..48: mol_type = other RNA
ttcagccctagggatgtaaaattccttgcccacagccttggcagcgcc

SEQ ID NO: 10040 - RNA, 48 nt, synthetic construct
  source 1..48: mol_type = other RNA
ttcagctctagggatgtaaaattccttgcccacagccttggcagcgcc

SEQ ID NO: 10041 - RNA, 40 nt, synthetic construct
  source 1..40: mol_type = other RNA
ttgggtccagggttggccttcccacagccttggcagcgcc

SEQ ID NO: 10042 - RNA, 55 nt, synthetic construct
  source 1..55: mol_type = other RNA
acggaaggccatgccagtgagatccgaccgtgtacagctgcaggccagcttggga

SEQ ID NO: 10043 - RNA, 38 nt, synthetic construct
  source 1..38: mol_type = other RNA
cagtgagcttaatttagctcgggctggccttgcccaca

SEQ ID NO: 10044 - RNA, 41 nt, synthetic construct
  source 1..41: mol_type = other RNA
ttcagttcagggatggccttacccacagccttggcagcgcc

SEQ ID NO: 10045 - RNA, 41 nt, synthetic construct
  source 1..41: mol_type = other RNA
tccagctccgggatgcccttgcccacagccttggcagcgcc

SEQ ID NO: 10046 - RNA, 43 nt, synthetic construct
  source 1..43: mol_type = other RNA
actctccttcagggatcaccttgcccacagccttggcagcgcc

SEQ ID NO: 10047 - RNA, 42 nt, synthetic construct
  source 1..42: mol_type = other RNA
ttcgctccaaggatgaagtttccccacagccttggcagcgcc

SEQ ID NO: 10048 - RNA, 37 nt, synthetic construct
  source 1..37: mol_type = other RNA
ttaagctcagggatgaacccacagccttggcagcgcc

SEQ ID NO: 10049 - RNA, 41 nt, synthetic construct
  source 1..41: mol_type = other RNA
ttcagctcaggcgtgacaagccccacagccttggcagcgcc

SEQ ID NO: 10050 - RNA, 57 nt, synthetic construct
  source 1..57: mol_type = other RNA
cagtgagcttccagttcagtaaaaaccatatgtaaatatatgcatgccttgcccaca

SEQ ID NO: 10051 - RNA, 41 nt, synthetic construct
  source 1..41: mol_type = other RNA
ctcagttccgggatggacttgcccacagccttggcagcgcc

SEQ ID NO: 10052 - RNA, 41 nt, synthetic construct
  source 1..41: mol_type = other RNA
ttcagcgctgggatgaccttgcccacagccttggcagcgcc

SEQ ID NO: 10053 - RNA, 42 nt, synthetic construct
  source 1..42: mol_type = other RNA
ttcagtctgaggatgcatcttgcccacagccttggcagcgcc

SEQ ID NO: 10054 - RNA, 41 nt, synthetic construct
  source 1..41: mol_type = other RNA
acggaaggccatgccagtgagtttcacgttcagtctgagga

SEQ ID NO: 10055 - RNA, 42 nt, synthetic construct
  source 1..42: mol_type = other RNA
ttctgggtccaaggataccttgcccacagccttggcagcgcc

SEQ ID NO: 10056 - RNA, 41 nt, synthetic construct
  source 1..41: mol_type = other RNA
acggaaggccatgccagtgagtttcacgttcagtctgtgga

SEQ ID NO: 10057 - RNA, 40 nt, synthetic construct
  source 1..40: mol_type = other RNA
ttagctcagggatccccttgcccacagccttggcagcgcc

SEQ ID NO: 10058 - RNA, 54 nt, synthetic construct
  source 1..54: mol_type = other RNA
cagtgagcttcctgttcattgagctatgatcacatcccttgtatcttgcccaca

SEQ ID NO: 10059 - RNA, 43 nt, synthetic construct
  source 1..43: mol_type = other RNA
acggaaggccatgccagtgagtttcccggattggtaataggga

SEQ ID NO: 10060 - RNA, 43 nt, synthetic construct
  source 1..43: mol_type = other RNA
gattggtcatagggatgtaaaaccccacagccttggcagcgcc

SEQ ID NO: 10061 - RNA, 43 nt, synthetic construct
  source 1..43: mol_type = other RNA
gattggtaatagggatgtaaaaccccacagccttggcagcgcc

SEQ ID NO: 10062 - RNA, 41 nt, synthetic construct
  source 1..41: mol_type = other RNA
tttagtccatggttggcctcgcccacagccttggcagcgcc

SEQ ID NO: 10063 - RNA, 41 nt, synthetic construct
  source 1..41: mol_type = other RNA
tttagttcatggttggcctcgcccacagccttggcagcgcc

SEQ ID NO: 10064 - RNA, 42 nt, synthetic construct
  source 1..42: mol_type = other RNA
ttccagggccgaggataccttgcccacagccttggcagcgcc

SEQ ID NO: 10065 - RNA, 42 nt, synthetic construct
  source 1..42: mol_type = other RNA
acggaaggccatgccagtgagctgccattccagggccgagga

SEQ ID NO: 10066 - RNA, 39 nt, synthetic construct
  source 1..39: mol_type = other RNA
ttcaaccgagggtaccttccccacagccttggcagcgcc

SEQ ID NO: 10067 - RNA, 53 nt, synthetic construct
  source 1..53: mol_type = other RNA
acggaaggccatgccagtgagccacccgctcggcccacacacacacacagggt

SEQ ID NO: 10068 - RNA, 55 nt, synthetic construct
  source 1..55: mol_type = other RNA
ctcagccgtgggatgactaaaaaaattctaccttacccacagccttggcagcgcc

SEQ ID NO: 10069 - RNA, 42 nt, synthetic construct
  source 1..42: mol_type = other RNA
acggaaggccatgccagtgagcgttgccgctcagccgtggga

SEQ ID NO: 10070 - RNA, 40 nt, synthetic construct
  source 1..40: mol_type = other RNA
ttaggcccaggtcgacttagcccacagccttggcagcgcc

SEQ ID NO: 10071 - RNA, 43 nt, synthetic construct
  source 1..43: mol_type = other RNA
ctcagctcagggatcaccttgcgcccacagccttggcagcgcc

SEQ ID NO: 10072 - RNA, 40 nt, synthetic construct
  source 1..40: mol_type = other RNA
tttagctcgggctggccatccccacagccttggcagcgcc

SEQ ID NO: 10073 - RNA, 38 nt, synthetic construct
  source 1..38: mol_type = other RNA
cagtgagcttaatttagcccgggctggccttgcccaca

SEQ ID NO: 10074 - RNA, 37 nt, synthetic construct
  source 1..37: mol_type = other RNA
acggaaggccatgccagtgatttaattcagctcgggc

SEQ ID NO: 10075 - RNA, 40 nt, synthetic construct
  source 1..40: mol_type = other RNA
tttagcccgggctggccatccccacagccttggcagcgcc

SEQ ID NO: 10076 - RNA, 41 nt, synthetic construct
  source 1..41: mol_type = other RNA
tcaagcccagggatgaccttgcccacagccttggcagcgcc

SEQ ID NO: 10077 - RNA, 41 nt, synthetic construct
  source 1..41: mol_type = other RNA
acggaaggccatgccagtgagcttcccgttaagctccggca

SEQ ID NO: 10078 - RNA, 41 nt, synthetic construct
  source 1..41: mol_type = other RNA
ttaagctccggcatgaccttgcccacagccttggcagcgcc

SEQ ID NO: 10079 - RNA, 41 nt, synthetic construct
  source 1..41: mol_type = other RNA
tttagtccagggatgaccttgcccacagccttggcagcgcc

SEQ ID NO: 10080 - RNA, 41 nt, synthetic construct
  source 1..41: mol_type = other RNA
tcaagcccagtgctgaccttgcccacagccttggcagcgcc

SEQ ID NO: 10081 - RNA, 45 nt, synthetic construct
  source 1..45: mol_type = other RNA
ctcggctcagggcgacaagaccttgcccacagccttggcagcgcc

SEQ ID NO: 10082 - RNA, 41 nt, synthetic construct
  source 1..41: mol_type = other RNA
tggcccagggaagtgatcttgcccacagccttggcagcgcc

SEQ ID NO: 10083 - RNA, 41 nt, synthetic construct
  source 1..41: mol_type = other RNA
tttagttcaagggtcaccttgcccacagccttggcagcgcc

SEQ ID NO: 10084 - RNA, 41 nt, synthetic construct
  source 1..41: mol_type = other RNA
tccagttcatagctggccttgcccacagccttggcagcgcc

SEQ ID NO: 10085 - RNA, 41 nt, synthetic construct
  source 1..41: mol_type = other RNA
ttcagtttagggctggccttgcccacagccttggcagcgcc

SEQ ID NO: 10086 - RNA, 41 nt, synthetic construct
  source 1..41: mol_type = other RNA
ttcagcccaggcgtgacaagccccacagccttggcagcgcc

SEQ ID NO: 10087 - RNA, 57 nt, synthetic construct
  source 1..57: mol_type = other RNA
cagtgagcttccagttcagtaaaaatcatatgtaaatatatgcatgccttgcccaca

SEQ ID NO: 10088 - RNA, 41 nt, synthetic construct
  source 1..41: mol_type = other RNA
tttagttcaggtacggccttgcccacagccttggcagcgcc

SEQ ID NO: 10089 - RNA, 43 nt, synthetic construct
  source 1..43: mol_type = other RNA
ttcagcccagagggacgaccttgcccacagccttggcagcgcc

SEQ ID NO: 10090 - RNA, 41 nt, synthetic construct
  source 1..41: mol_type = other RNA
gttagcccagggatgaccttgcccacagccttggcagcgcc

SEQ ID NO: 10091 - RNA, 41 nt, synthetic construct
  source 1..41: mol_type = other RNA
tttggctctgagatgatcttgcccacagccttggcagcgcc

SEQ ID NO: 10092 - RNA, 41 nt, synthetic construct
  source 1..41: mol_type = other RNA
tttggccctgagatggtcttgcccacagccttggcagcgcc

SEQ ID NO: 10093 - RNA, 43 nt, synthetic construct
  source 1..43: mol_type = other RNA
gttggctcagggggaagaccgtgcccacagccttggcagcgcc

SEQ ID NO: 10094 - RNA, 42 nt, synthetic construct
  source 1..42: mol_type = other RNA
ttcagtctgtggatgcatcttgcccacagccttggcagcgcc

SEQ ID NO: 10095 - RNA, 41 nt, synthetic construct
  source 1..41: mol_type = other RNA
ttcgggttcaagactaccttgcccacagccttggcagcgcc

SEQ ID NO: 10096 - RNA, 41 nt, synthetic construct
  source 1..41: mol_type = other RNA
tcaagtccagggttggccttgcccacagccttggcagcgcc

SEQ ID NO: 10097 - RNA, 42 nt, synthetic construct
  source 1..42: mol_type = other RNA
ttacagcccaggcatgatcttacccacagccttggcagcgcc

SEQ ID NO: 10098 - RNA, 53 nt, synthetic construct
  source 1..53: mol_type = other RNA
cagtgagcttcccgctcggcccacacacacacacagggttgaacttgcccaca

SEQ ID NO: 10099 - RNA, 55 nt, synthetic construct
  source 1..55: mol_type = other RNA
acggaaggccatgccagtgagatccgaccgtgtacagccgcaggccagcttggga

SEQ ID NO: 10100 - RNA, 37 nt, synthetic construct
  source 1..37: mol_type = other RNA
gctcagggatgaccttgcccacagccttggcagcgcc

SEQ ID NO: 10101 - RNA, 45 nt, synthetic construct
  source 1..45: mol_type = other RNA
ttcaggtcagcagaaaatgatcttgcccacagccttggcagcgcc

SEQ ID NO: 10102 - RNA, 52 nt, synthetic construct
  source 1..52: mol_type = other RNA
acggaaggccatgccagtgagcttgtcccgttcaatgagctatgatcacatc

SEQ ID NO: 10103 - RNA, 53 nt, synthetic construct
  source 1..53: mol_type = other RNA
acggaaggccatgccagtgagccacccgctcggctcacacacacacacagggt

SEQ ID NO: 10104 - RNA, 41 nt, synthetic construct
  source 1..41: mol_type = other RNA
acggaaggccatgccagtgagcttcccgttcagcttagtta

SEQ ID NO: 10105 - RNA, 41 nt, synthetic construct
  source 1..41: mol_type = other RNA
acggaaggccatgccagtgagcttcccgtccagctccggga

SEQ ID NO: 10106 - RNA, 41 nt, synthetic construct
  source 1..41: mol_type = other RNA
ttcagtctagggctggccttgcccacagccttggcagcgcc

SEQ ID NO: 10107 - RNA, 41 nt, synthetic construct
  source 1..41: mol_type = other RNA
tttggccctgagatgatcttgcccacagccttggcagcgcc

SEQ ID NO: 10108 - RNA, 41 nt, synthetic construct
  source 1..41: mol_type = other RNA
ttctgcccagggatgaccttgcccacagccttggcagcgcc

SEQ ID NO: 10109 - RNA, 42 nt, synthetic construct
  source 1..42: mol_type = other RNA
acggaaggccatgccagtgagcttcccgttcagcccaaggga

SEQ ID NO: 10110 - RNA, 41 nt, synthetic construct
  source 1..41: mol_type = other RNA
ctgcagtggtggagttcggcacacccgactttgaagaagtt

SEQ ID NO: 10111 - RNA, 40 nt, synthetic construct
  source 1..40: mol_type = other RNA
tctgggctgaagtggtggagacggcaaaccccactttgaa

SEQ ID NO: 10112 - RNA, 41 nt, synthetic construct
  source 1..41: mol_type = other RNA
ctgcagtggtggggagcggcagaccccactttgaagaagtt

SEQ ID NO: 10113 - RNA, 41 nt, synthetic construct
  source 1..41: mol_type = other RNA
ctgcagtggtggagttcggcaaacccgactttgaagaagtt

SEQ ID NO: 10114 - RNA, 41 nt, synthetic construct
  source 1..41: mol_type = other RNA
ctgcagtgttggaggtcggcaaaccccactttgaagaagtt

SEQ ID NO: 10115 - RNA, 41 nt, synthetic construct
  source 1..41: mol_type = other RNA
tctgggctgcagtggtggagttcggcaaacccgactttgaa

SEQ ID NO: 10116 - RNA, 41 nt, synthetic construct
  source 1..41: mol_type = other RNA
tctgggctgcagtggtggcaatcggcaaaccccactttgaa

SEQ ID NO: 10117 - RNA, 41 nt, synthetic construct
  source 1..41: mol_type = other RNA
tctgggctgcagtggcggagatcgacgaaccccactttgaa

SEQ ID NO: 10118 - RNA, 41 nt, synthetic construct
  source 1..41: mol_type = other RNA
tctgggctgcagtggtggaggtcggccaaccccactttgaa

SEQ ID NO: 10119 - RNA, 41 nt, synthetic construct
  source 1..41: mol_type = other RNA
tctgggctgcattggtggagaacggcaaaccccactttgaa

SEQ ID NO: 10120 - RNA, 40 nt, synthetic construct
  source 1..40: mol_type = other RNA
ctgcagtggtggagacggcaaaccccactttgaagaagtt

SEQ ID NO: 10121 - RNA, 41 nt, synthetic construct
  source 1..41: mol_type = other RNA
ctgcagtggtggagattggtaaaccccaccttaaagaagtt

SEQ ID NO: 10122 - RNA, 42 nt, synthetic construct
  source 1..42: mol_type = other RNA
tctgggctgcagtggtggagggtcggtgaaccccactttgaa

SEQ ID NO: 10123 - RNA, 39 nt, synthetic construct
  source 1..39: mol_type = other RNA
tctgggctacagtggtggaggtcggcaccccactttgaa

SEQ ID NO: 10124 - RNA, 41 nt, synthetic construct
  source 1..41: mol_type = other RNA
tctgggctgcactggtgggggtaggcaaaccccactttgaa

SEQ ID NO: 10125 - RNA, 41 nt, synthetic construct
  source 1..41: mol_type = other RNA
tctgggctgcagtggtggaactcggcaaaccccactttgaa

SEQ ID NO: 10126 - RNA, 41 nt, synthetic construct
  source 1..41: mol_type = other RNA
tctgggctgcagtggtggagttcggcaaacgccactttgaa

SEQ ID NO: 10127 - RNA, 41 nt, synthetic construct
  source 1..41: mol_type = other RNA
tctgggctgcaatggcagggatcggcaaaccccactttgaa

SEQ ID NO: 10128 - RNA, 41 nt, synthetic construct
  source 1..41: mol_type = other RNA
tctgggctgcaacggtggagatcggtaaaccccactttgaa

SEQ ID NO: 10129 - RNA, 41 nt, synthetic construct
  source 1..41: mol_type = other RNA
tctgggctgcaggggtggagatcgaagaacccgactttgaa

SEQ ID NO: 10130 - RNA, 41 nt, synthetic construct
  source 1..41: mol_type = other RNA
tctgggctgcggtggtggagatcggcgaacccgactttgaa

SEQ ID NO: 10131 - RNA, 43 nt, synthetic construct
  source 1..43: mol_type = other RNA
ctgcagtggtggagaacggcaaaccccagactttaaagaagtt

SEQ ID NO: 10132 - RNA, 41 nt, synthetic construct
  source 1..41: mol_type = other RNA
tctgggctgcactggtggggataggtaaaccccactttgaa

SEQ ID NO: 10133 - RNA, 41 nt, synthetic construct
  source 1..41: mol_type = other RNA
ctgcagtggcggagatcgacgaaccccactatgaagaagtt

SEQ ID NO: 10134 - RNA, 41 nt, synthetic construct
  source 1..41: mol_type = other RNA
ctgcagtggtggagatcgaagaacccgactatgaagaagtt

SEQ ID NO: 10135 - RNA, 41 nt, synthetic construct
  source 1..41: mol_type = other RNA
ctgcagtggtggaactcggcaaaccccactttgaagaagtt

SEQ ID NO: 10136 - RNA, 41 nt, synthetic construct
  source 1..41: mol_type = other RNA
tctgggctgaagtggtggagatcggcgaatcccactttgaa

SEQ ID NO: 10137 - RNA, 41 nt, synthetic construct
  source 1..41: mol_type = other RNA
tctgggctgcagtggtggaggtcgcaaaactccactttgaa

SEQ ID NO: 10138 - RNA, 41 nt, synthetic construct
  source 1..41: mol_type = other RNA
tctgggctgcactggtggaattcggagagccccactttgaa

SEQ ID NO: 10139 - RNA, 41 nt, synthetic construct
  source 1..41: mol_type = other RNA
tctgggctgcactcgtggagatcgacaaaccccactttgaa

SEQ ID NO: 10140 - RNA, 41 nt, synthetic construct
  source 1..41: mol_type = other RNA
ctgcagtggtggaggtcggcaaatcccactttgaagaagtt

SEQ ID NO: 10141 - RNA, 42 nt, synthetic construct
  source 1..42: mol_type = other RNA
tctgggctgaagtggtggaggaacggaaaacccgactttgaa

SEQ ID NO: 10142 - RNA, 41 nt, synthetic construct
  source 1..41: mol_type = other RNA
tctgggctgcagtggtgggcatcggcgaaccccactttgaa

SEQ ID NO: 10143 - RNA, 41 nt, synthetic construct
  source 1..41: mol_type = other RNA
tctgggctgcagtggcggagctcggcagaccccactttgaa

SEQ ID NO: 10144 - RNA, 41 nt, synthetic construct
  source 1..41: mol_type = other RNA
ctgcagtggtggagatcggcaaaccccactttgaagaagtt

SEQ ID NO: 10145 - RNA, 31 nt, synthetic construct
  source 1..31: mol_type = other RNA
tgcagtggcggagctcggcagaccccacttt

SEQ ID NO: 10146 - RNA, 41 nt, synthetic construct
  source 1..41: mol_type = other RNA
tctgggctgcagtggtggagctcggcacaccccactttgaa

SEQ ID NO: 10147 - RNA, 41 nt, synthetic construct
  source 1..41: mol_type = other RNA
ctgcagtggtggagattggcacttcccactttgaagaagtt

SEQ ID NO: 10148 - RNA, 41 nt, synthetic construct
  source 1..41: mol_type = other RNA
tctgggctgcagtggtggaggtcggcaaatcccactttgaa

SEQ ID NO: 10149 - RNA, 41 nt, synthetic construct
  source 1..41: mol_type = other RNA
ctgcagtggtggaggtcggcaaaccccactttgaagaagtt

SEQ ID NO: 10150 - RNA, 41 nt, synthetic construct
  source 1..41: mol_type = other RNA
tctgggctgcagtagtggaattcggcagaccccactttgaa

SEQ ID NO: 10151 - RNA, 41 nt, synthetic construct
  source 1..41: mol_type = other RNA
tctgggctgcagtggtggagttcggcacacccgactttgaa

SEQ ID NO: 10152 - RNA, 41 nt, synthetic construct
  source 1..41: mol_type = other RNA
tctgggctgcagtggtggagatcggaacaccccactttgaa

SEQ ID NO: 10153 - RNA, 41 nt, synthetic construct
  source 1..41: mol_type = other RNA
ctgcagtggtggggataggtaaaccccattttgaagaagtt

SEQ ID NO: 10154 - RNA, 41 nt, synthetic construct
  source 1..41: mol_type = other RNA
tctgggctgcagtggtggagattggtaaaccccactttgaa

SEQ ID NO: 10155 - RNA, 41 nt, synthetic construct
  source 1..41: mol_type = other RNA
ctgcagtggtggagatcggcaaatcccactttgaagaagtt

SEQ ID NO: 10156 - RNA, 41 nt, synthetic construct
  source 1..41: mol_type = other RNA
ctgcagtggtgggggtaggcaaaccccactttgaagaagtt

SEQ ID NO: 10157 - RNA, 41 nt, synthetic construct
  source 1..41: mol_type = other RNA
ctgcagtggtggcaatcggcaaaccccactttgaagaagtt

SEQ ID NO: 10158 - RNA, 42 nt, synthetic construct
  source 1..42: mol_type = other RNA
ctgcagtggtggagggtcggtgaacccctctttgaagaagtt

SEQ ID NO: 10159 - RNA, 41 nt, synthetic construct
  source 1..41: mol_type = other RNA
tctgggctgcagtggtggagatcggcacaccccactttgaa

SEQ ID NO: 10160 - RNA, 41 nt, synthetic construct
  source 1..41: mol_type = other RNA
tctgggctgcagtagtggagattggcaaaccccactttgaa

SEQ ID NO: 10161 - RNA, 41 nt, synthetic construct
  source 1..41: mol_type = other RNA
ctgcagtggtgggcatcggcgaaccccagcttgaagaagtt

SEQ ID NO: 10162 - RNA, 31 nt, synthetic construct
  source 1..31: mol_type = other RNA
tgcagtgatggagaacggcaagcccaacttt

SEQ ID NO: 10163 - RNA, 41 nt, synthetic construct
  source 1..41: mol_type = other RNA
ctgcagtggtggcaatcggcaacccccactttgaagaagtt

SEQ ID NO: 10164 - RNA, 41 nt, synthetic construct
  source 1..41: mol_type = other RNA
tctgggctgcagtggtcgagatcggcggaccccactttgaa

SEQ ID NO: 10165 - RNA, 41 nt, synthetic construct
  source 1..41: mol_type = other RNA
tctgggctgcagtggtggagatcgcaaagccccactttgaa

SEQ ID NO: 10166 - RNA, 41 nt, synthetic construct
  source 1..41: mol_type = other RNA
ctgcagtggtggagatcgacaaaccccactttgaagaagtt

SEQ ID NO: 10167 - RNA, 41 nt, synthetic construct
  source 1..41: mol_type = other RNA
tctgggctgcagtggtggaaatcggcaaactccactttgaa

SEQ ID NO: 10168 - RNA, 41 nt, synthetic construct
  source 1..41: mol_type = other RNA
ctgcagtggtggagatcggcaaaccccgctttgaagaagtt

SEQ ID NO: 10169 - RNA, 41 nt, synthetic construct
  source 1..41: mol_type = other RNA
tctgggctgcagtggtggggataggcaaactctactttgaa

SEQ ID NO: 10170 - RNA, 41 nt, synthetic construct
  source 1..41: mol_type = other RNA
ctgcagtggtggaattcggcagaccccacttttaagaagtt

SEQ ID NO: 10171 - RNA, 41 nt, synthetic construct
  source 1..41: mol_type = other RNA
ctgcagtggtaaaggtcggcacaccccactttgaagaagtt

SEQ ID NO: 10172 - RNA, 41 nt, synthetic construct
  source 1..41: mol_type = other RNA
ctgcagtggtcgagatcggcggaccccacttcgaagaagtt

SEQ ID NO: 10173 - RNA, 41 nt, synthetic construct
  source 1..41: mol_type = other RNA
ctgcagtggtggaggtcggccgaccccactttgaagaagtt

SEQ ID NO: 10174 - RNA, 41 nt, synthetic construct
  source 1..41: mol_type = other RNA
tctgggctgctgtagtggggagcggcagaccccactttgaa

SEQ ID NO: 10175 - RNA, 41 nt, synthetic construct
  source 1..41: mol_type = other RNA
ctgcagtggcggagctcggcagaccccactttgaagaagtt

SEQ ID NO: 10176 - RNA, 41 nt, synthetic construct
  source 1..41: mol_type = other RNA
tctgggctgcagtggtggaactcggcacgccccactttgaa

SEQ ID NO: 10177 - RNA, 41 nt, synthetic construct
  source 1..41: mol_type = other RNA
tctgggctgcagtggtggagatcggcaaatcccactttgaa

SEQ ID NO: 10178 - RNA, 41 nt, synthetic construct
  source 1..41: mol_type = other RNA
ctgcagtggtggagatcggtaaaccccactttgaagaagtt

SEQ ID NO: 10179 - RNA, 30 nt, synthetic construct
  source 1..30: mol_type = other RNA
tgcagtggtggagacggcaaaccccacttt

SEQ ID NO: 10180 - RNA, 41 nt, synthetic construct
  source 1..41: mol_type = other RNA
tctgggctgaagtggtggaggtcggcaaaccccactttgaa

SEQ ID NO: 10181 - RNA, 41 nt, synthetic construct
  source 1..41: mol_type = other RNA
tctgggctgcagtggtggaaatcggcagcctccactttgaa

SEQ ID NO: 10182 - RNA, 41 nt, synthetic construct
  source 1..41: mol_type = other RNA
tctgggctggagtgggggagaccggcaaaccccactttgaa

SEQ ID NO: 10183 - RNA, 41 nt, synthetic construct
  source 1..41: mol_type = other RNA
tctgggctgcagaggtggcaatcggcaacccccactttgaa

SEQ ID NO: 10184 - RNA, 41 nt, synthetic construct
  source 1..41: mol_type = other RNA
tctgggctgcagtggcggaacttggcaattcccactttgaa

SEQ ID NO: 10185 - RNA, 41 nt, synthetic construct
  source 1..41: mol_type = other RNA
tctgggctgcagtggtggaggtcggccgaccccactttgaa

SEQ ID NO: 10186 - RNA, 41 nt, synthetic construct
  source 1..41: mol_type = other RNA
ctgcagtggtggaaatcggcaaactccactttgaagaagtt

SEQ ID NO: 10187 - RNA, 41 nt, synthetic construct
  source 1..41: mol_type = other RNA
tctgggctacagcggtggagattggcacttcccactttgaa

SEQ ID NO: 10188 - RNA, 41 nt, synthetic construct
  source 1..41: mol_type = other RNA
tctgggctgcagtggtcgagatcggcgggccccactttgaa

SEQ ID NO: 10189 - RNA, 41 nt, synthetic construct
  source 1..41: mol_type = other RNA
ctgcagtggtggagatcggtaaaccccactttcaagaagtt

SEQ ID NO: 10190 - RNA, 42 nt, synthetic construct
  source 1..42: mol_type = other RNA
ctgcagtgggtggaggtagcgcaaccccactttgaagaagtt

SEQ ID NO: 10191 - RNA, 41 nt, synthetic construct
  source 1..41: mol_type = other RNA
tctgggctgcagtcgtgacggtcggtgaaccccactttgaa

SEQ ID NO: 10192 - RNA, 41 nt, synthetic construct
  source 1..41: mol_type = other RNA
tctgggctgaagtggtggtgattggcaggccccactttgaa

SEQ ID NO: 10193 - RNA, 41 nt, synthetic construct
  source 1..41: mol_type = other RNA
ctgcagtggtggagatcggcagaccccactttgaagaagtt

SEQ ID NO: 10194 - RNA, 31 nt, synthetic construct
  source 1..31: mol_type = other RNA
tgcagtgatggctgtcgacccgccccacttt

SEQ ID NO: 10195 - RNA, 41 nt, synthetic construct
  source 1..41: mol_type = other RNA
ctgcagtggtggagattggcaaaccccacattgaagaagtt

SEQ ID NO: 10196 - RNA, 39 nt, synthetic construct
  source 1..39: mol_type = other RNA
ctgcagtggtggaggtcggcaccccactttgaagaagtt

SEQ ID NO: 10197 - RNA, 41 nt, synthetic construct
  source 1..41: mol_type = other RNA
tctgggctgcggtggtggagatcggcgaaccctactttgaa

SEQ ID NO: 10198 - RNA, 41 nt, synthetic construct
  source 1..41: mol_type = other RNA
ctgcaaaccccacattgaagaagttctgggattttctgttg

SEQ ID NO: 10199 - RNA, 41 nt, synthetic construct
  source 1..41: mol_type = other RNA
ctgcagtgggggagaccggcaaaccccactttgaagaagtt

SEQ ID NO: 10200 - RNA, 42 nt, synthetic construct
  source 1..42: mol_type = other RNA
tctgggctgcatccggtggaggtagcgcaaccccactttgaa

SEQ ID NO: 10201 - RNA, 31 nt, synthetic construct
  source 1..31: mol_type = other RNA
gatctgcaaggctccaatttgagaagttcct

SEQ ID NO: 10202 - RNA, 41 nt, synthetic construct
  source 1..41: mol_type = other RNA
tctgggctgcagtggttcagatcgacaattcccactttgaa

SEQ ID NO: 10203 - RNA, 41 nt, synthetic construct
  source 1..41: mol_type = other RNA
tctgggctgcagtagtcgggatcggcgggccccactttgaa

SEQ ID NO: 10204 - RNA, 41 nt, synthetic construct
  source 1..41: mol_type = other RNA
ctgcagtggtggagatcggcgaatccctccttgaagaagtt

SEQ ID NO: 10205 - RNA, 41 nt, synthetic construct
  source 1..41: mol_type = other RNA
tctgggctgcagtggtggtaattggcaaactccactttgaa

SEQ ID NO: 10206 - RNA, 41 nt, synthetic construct
  source 1..41: mol_type = other RNA
tctgggctgcagtgatggatatcggaaaactccactttgaa

SEQ ID NO: 10207 - RNA, 41 nt, synthetic construct
  source 1..41: mol_type = other RNA
tctgggctgcagtgatggacgtcggaaaactccactttgaa

SEQ ID NO: 10208 - RNA, 41 nt, synthetic construct
  source 1..41: mol_type = other RNA
agatctgcggactccactttgaagaagttccgggattttct

SEQ ID NO: 10209 - RNA, 41 nt, synthetic construct
  source 1..41: mol_type = other RNA
tctgggctgcagtggtggacgatggaaggccccactttgaa

SEQ ID NO: 10210 - RNA, 41 nt, synthetic construct
  source 1..41: mol_type = other RNA
tctgggctgaactgatggagaacggcaagcccaactttgaa

SEQ ID NO: 10211 - RNA, 30 nt, synthetic construct
  source 1..30: mol_type = other RNA
gatctgcacgccccactgcaaggacttcct

SEQ ID NO: 10212 - RNA, 41 nt, synthetic construct
  source 1..41: mol_type = other RNA
tggtggagttcggcacacccgactttgaagatgttcctgga

SEQ ID NO: 10213 - RNA, 41 nt, synthetic construct
  source 1..41: mol_type = other RNA
tctgggctgcagtggtggagatcggtaaaccccactttgaa

SEQ ID NO: 10214 - RNA, 41 nt, synthetic construct
  source 1..41: mol_type = other RNA
tctgggctgcagtggcggagatcggcaaggtccactttgaa

SEQ ID NO: 10215 - RNA, 41 nt, synthetic construct
  source 1..41: mol_type = other RNA
ctgcagtggtggagatcgcaaagccccacttcaaagaagtt

SEQ ID NO: 10216 - RNA, 31 nt, synthetic construct
  source 1..31: mol_type = other RNA
tgcagtggtggagctcggcacaccccacttt

SEQ ID NO: 10217 - RNA, 31 nt, synthetic construct
  source 1..31: mol_type = other RNA
tgcagtggtggcgattgcaaaaccccacttt

SEQ ID NO: 10218 - RNA, 31 nt, synthetic construct
  source 1..31: mol_type = other RNA
tgcagtgagggagatcggcaaaccccacttt

SEQ ID NO: 10219 - RNA, 41 nt, synthetic construct
  source 1..41: mol_type = other RNA
tctgggctaccgtgatggcaatcggcaacccccactttgaa

SEQ ID NO: 10220 - RNA, 41 nt, synthetic construct
  source 1..41: mol_type = other RNA
tctgggctacagtggtggacgtcggcagactccactttgaa

SEQ ID NO: 10221 - RNA, 41 nt, synthetic construct
  source 1..41: mol_type = other RNA
tctgggctgaagtgctggaaatcggcaccccccactttgaa

SEQ ID NO: 10222 - RNA, 53 nt, synthetic construct
  source 1..53: mol_type = other RNA
ctgcagtggtggaattctgagagccccacacacacacacacttagaagaagtt

SEQ ID NO: 10223 - RNA, 41 nt, synthetic construct
  source 1..41: mol_type = other RNA
ctgcaaactccacttcgacgaatttctgggattttctgttg

SEQ ID NO: 10224 - RNA, 42 nt, synthetic construct
  source 1..42: mol_type = other RNA
tctgggctgcagtggtggagatcggcaaaccaccactttgaa

SEQ ID NO: 10225 - RNA, 41 nt, synthetic construct
  source 1..41: mol_type = other RNA
ctgcagtggtggcgattgcaaaaccccactatgaagaagtt

SEQ ID NO: 10226 - RNA, 41 nt, synthetic construct
  source 1..41: mol_type = other RNA
ctgcagtggtggagatcggcgaacccgaatttgaagaagtt

SEQ ID NO: 10227 - RNA, 41 nt, synthetic construct
  source 1..41: mol_type = other RNA
tctgggctgcagtggtggatctcgaaataccccactttgaa

SEQ ID NO: 10228 - RNA, 31 nt, synthetic construct
  source 1..31: mol_type = other RNA
tgcagtggtggtgattggtaggtcccacttt

SEQ ID NO: 10229 - RNA, 41 nt, synthetic construct
  source 1..41: mol_type = other RNA
agatctgcaaatcccactttgaagaagttccgggattttct

SEQ ID NO: 10230 - RNA, 41 nt, synthetic construct
  source 1..41: mol_type = other RNA
tctgggctgcagtggtggagatcggcagactccactttgaa

SEQ ID NO: 10231 - RNA, 41 nt, synthetic construct
  source 1..41: mol_type = other RNA
tctgggctgcagtggtggagattggctgctcccactttgaa

SEQ ID NO: 10232 - RNA, 41 nt, synthetic construct
  source 1..41: mol_type = other RNA
tctgggctgtagtgagggagatcggcaaaccccactttgaa

SEQ ID NO: 10233 - RNA, 41 nt, synthetic construct
  source 1..41: mol_type = other RNA
tggtggagttcggcaaacccgactttgaagatgttcctgga

SEQ ID NO: 10234 - RNA, 40 nt, synthetic construct
  source 1..40: mol_type = other RNA
ctgcaaacgccgatttgagaagtttcgggatattctgttg

SEQ ID NO: 10235 - RNA, 41 nt, synthetic construct
  source 1..41: mol_type = other RNA
tctgggctgcagtggtggagatcggcaccccccactttgaa

SEQ ID NO: 10236 - RNA, 41 nt, synthetic construct
  source 1..41: mol_type = other RNA
agatctgcaaactccactttgaaggagttccgggattttct

SEQ ID NO: 10237 - RNA, 41 nt, synthetic construct
  source 1..41: mol_type = other RNA
tctgggctgtagtggtaaaggtcggcacaccccactttgaa

SEQ ID NO: 10238 - RNA, 41 nt, synthetic construct
  source 1..41: mol_type = other RNA
ctgcagtgctggaaatcggcaccccccactttcaagaagtt

SEQ ID NO: 10239 - RNA, 31 nt, synthetic construct
  source 1..31: mol_type = other RNA
tgcagtggtggaactcggcacgccccacttt

SEQ ID NO: 10240 - RNA, 41 nt, synthetic construct
  source 1..41: mol_type = other RNA
tctgggctgcagtggtggagatcggcagcacccactttgaa

SEQ ID NO: 10241 - RNA, 42 nt, synthetic construct
  source 1..42: mol_type = other RNA
tctgggctgccgtggtggagacgtgcaatgctccactttgaa

SEQ ID NO: 10242 - RNA, 41 nt, synthetic construct
  source 1..41: mol_type = other RNA
ctgcagtggtggaggtcggccaacccccctttgaagaagtt

SEQ ID NO: 10243 - RNA, 31 nt, synthetic construct
  source 1..31: mol_type = other RNA
gatctgcacacccgactttgaagatgttcct

SEQ ID NO: 10244 - RNA, 41 nt, synthetic construct
  source 1..41: mol_type = other RNA
ctgcagtggtggacgatggaaggccccactttaaagaagtt

SEQ ID NO: 10245 - RNA, 55 nt, synthetic construct
  source 1..55: mol_type = other RNA
agatctgcaaacccgtctttgaagtaaaaaaattctacaagcgaggggattttct

SEQ ID NO: 10246 - RNA, 42 nt, synthetic construct
  source 1..42: mol_type = other RNA
ctgcagtggtggaggaacggaaaacccgtctttgaagaagtt

SEQ ID NO: 10247 - RNA, 41 nt, synthetic construct
  source 1..41: mol_type = other RNA
ctgcagtggtggaaatcggcagcctccactttgaagaagtt

SEQ ID NO: 10248 - RNA, 41 nt, synthetic construct
  source 1..41: mol_type = other RNA
agatctgcgaaccccagcttgaagaagttccgggattttct

SEQ ID NO: 10249 - RNA, 43 nt, synthetic construct
  source 1..43: mol_type = other RNA
ctgcagtggtggagatcggcaccccccaaactttgaagaagtt

SEQ ID NO: 10250 - RNA, 41 nt, synthetic construct
  source 1..41: mol_type = other RNA
ctgcagtggtggacgtcggcagactccactttgaagaagtt

SEQ ID NO: 10251 - RNA, 41 nt, synthetic construct
  source 1..41: mol_type = other RNA
ctgcagtggtcgggatcggcgggccccaatccgaagaagtt

SEQ ID NO: 10252 - RNA, 31 nt, synthetic construct
  source 1..31: mol_type = other RNA
ggagatcggcgaatccctccttgaagaagtt

SEQ ID NO: 10253 - RNA, 41 nt, synthetic construct
  source 1..41: mol_type = other RNA
ctgcagtgatggcaatcggcaacccccactttgaagaagtt

SEQ ID NO: 10254 - RNA, 41 nt, synthetic construct
  source 1..41: mol_type = other RNA
ctgcagtggtggagatcggcgaaccctacggtgaagaagtt

SEQ ID NO: 10255 - RNA, 41 nt, synthetic construct
  source 1..41: mol_type = other RNA
ctgcagtggtggaacgcggcggagcccacttagaagaagtt

SEQ ID NO: 10256 - RNA, 41 nt, synthetic construct
  source 1..41: mol_type = other RNA
tctgggctgccaggtggtggatcggcagaccccactttgaa

SEQ ID NO: 10257 - RNA, 32 nt, synthetic construct
  source 1..32: mol_type = other RNA
tgcagtggtggaggaacggaaaacccgacttt

SEQ ID NO: 10258 - RNA, 41 nt, synthetic construct
  source 1..41: mol_type = other RNA
ctgcaaactccactgtaaggaagttccgggattttctgttg

SEQ ID NO: 10259 - RNA, 41 nt, synthetic construct
  source 1..41: mol_type = other RNA
agatctgcagaccccactttgtagaaatatagggattttct

SEQ ID NO: 10260 - RNA, 40 nt, synthetic construct
  source 1..40: mol_type = other RNA
agatctgcaaacccccctttgaacaagttccggattttct

SEQ ID NO: 10261 - RNA, 32 nt, synthetic construct
  source 1..32: mol_type = other RNA
caaaccccattttgacagaagtcccgagattt

SEQ ID NO: 10262 - RNA, 46 nt, synthetic construct
  source 1..46: mol_type = other RNA
tctgggctgcagttcggtgttggaggtcggcaaaccccactttgaa

SEQ ID NO: 10263 - RNA, 38 nt, synthetic construct
  source 1..38: mol_type = other RNA
tctgggctgccgtggtggaacgtcgaccccactttgaa

SEQ ID NO: 10264 - RNA, 31 nt, synthetic construct
  source 1..31: mol_type = other RNA
tgcagtggtggagttcggcaaacccgacttt

SEQ ID NO: 10265 - RNA, 41 nt, synthetic construct
  source 1..41: mol_type = other RNA
tctgggctgcagtgatggctgtcgacccgccccactttgaa

SEQ ID NO: 10266 - RNA, 31 nt, synthetic construct
  source 1..31: mol_type = other RNA
gatctgcatgctccacttagaggaagttcct

SEQ ID NO: 10267 - RNA, 41 nt, synthetic construct
  source 1..41: mol_type = other RNA
tctgggctgaggtggtggagatcggcaaaccccactttgaa

SEQ ID NO: 10268 - RNA, 31 nt, synthetic construct
  source 1..31: mol_type = other RNA
tgcagtagtggagattggcaaaccccacttt

SEQ ID NO: 10269 - RNA, 33 nt, synthetic construct
  source 1..33: mol_type = other RNA
gatctgcagactcccggcattgaagggattcct

SEQ ID NO: 10270 - RNA, 41 nt, synthetic construct
  source 1..41: mol_type = other RNA
ctgcagtggtggagatcggaacacccccctttgaagaagtt

SEQ ID NO: 10271 - RNA, 39 nt, synthetic construct
  source 1..39: mol_type = other RNA
ctgcagtggtggatcggcagaccccactttgaagaagtt

SEQ ID NO: 10272 - RNA, 31 nt, synthetic construct
  source 1..31: mol_type = other RNA
tgcagtggtggagaacggcaaaccccacttt

SEQ ID NO: 10273 - RNA, 39 nt, synthetic construct
  source 1..39: mol_type = other RNA
agatctgcatgctccacttagaggaagccgggattttct

SEQ ID NO: 10274 - RNA, 41 nt, synthetic construct
  source 1..41: mol_type = other RNA
ctgcagtgagggagatcggcaaacccccctttgaagaagtt

SEQ ID NO: 10275 - RNA, 41 nt, synthetic construct
  source 1..41: mol_type = other RNA
agatctgcagaccccacttttttgaagttccgggattttct

SEQ ID NO: 10276 - RNA, 32 nt, synthetic construct
  source 1..32: mol_type = other RNA
caaaccccactttgaccgaagtcccgggattt

SEQ ID NO: 10277 - RNA, 41 nt, synthetic construct
  source 1..41: mol_type = other RNA
ctgcagtggtggagctcggcacacccccctatgaagaagtt

SEQ ID NO: 10278 - RNA, 41 nt, synthetic construct
  source 1..41: mol_type = other RNA
agatctgcaattcccactttgaagaagtttcgggattttct

SEQ ID NO: 10279 - RNA, 31 nt, synthetic construct
  source 1..31: mol_type = other RNA
ggagatcggcagaccccactttgatgaagtt

SEQ ID NO: 10280 - RNA, 41 nt, synthetic construct
  source 1..41: mol_type = other RNA
agatctgcagaccccactttgaagaagttccgagattttct

SEQ ID NO: 10281 - RNA, 31 nt, synthetic construct
  source 1..31: mol_type = other RNA
gatctgtagttccaactttgaagaagttcct

SEQ ID NO: 10282 - RNA, 41 nt, synthetic construct
  source 1..41: mol_type = other RNA
agatctgcagaccccactttgaagaagttccgggattttct

SEQ ID NO: 10283 - RNA, 33 nt, synthetic construct
  source 1..33: mol_type = other RNA
gatctagcaatgctccactttgtagaagttcct

SEQ ID NO: 10284 - RNA, 40 nt, synthetic construct
  source 1..40: mol_type = other RNA
tctgggctgcagtgtggagcttggcaggctccactttgaa

SEQ ID NO: 10285 - RNA, 41 nt, synthetic construct
  source 1..41: mol_type = other RNA
agatctgcaggcccctccttgaggaagtttcgggattttct

SEQ ID NO: 10286 - RNA, 49 nt, synthetic construct
  source 1..49: mol_type = other RNA
agatctgcccgccccactttgatctcctgcagaagtcatcggattttct

SEQ ID NO: 10287 - RNA, 41 nt, synthetic construct
  source 1..41: mol_type = other RNA
tctgggctgccgtggtggaacgcggcggagcccactttgaa

SEQ ID NO: 10288 - RNA, 41 nt, synthetic construct
  source 1..41: mol_type = other RNA
ctgcagtggtggtgattggtaggtccctccttgaagaagtt

SEQ ID NO: 10289 - RNA, 41 nt, synthetic construct
  source 1..41: mol_type = other RNA
tctgggctgcagtgatggacgtcggagaactccactttgaa

SEQ ID NO: 10290 - RNA, 41 nt, synthetic construct
  source 1..41: mol_type = other RNA
tctgggctgccgtgatggacgtcgacacctccaactttgaa

SEQ ID NO: 10291 - RNA, 33 nt, synthetic construct
  source 1..33: mol_type = other RNA
gatctgcaaaccccagactttaaagaagttcct

SEQ ID NO: 10292 - RNA, 41 nt, synthetic construct
  source 1..41: mol_type = other RNA
tggtggagatcggcgaaccccagcttgaagaagttcctgga

SEQ ID NO: 10293 - RNA, 41 nt, synthetic construct
  source 1..41: mol_type = other RNA
ctgcagtggtggtgattggcaggcccctccttgaagaagtt

SEQ ID NO: 10294 - RNA, 41 nt, synthetic construct
  source 1..41: mol_type = other RNA
ctgcaaaccccactttgatgaagctccgggtttttctgttg

SEQ ID NO: 10295 - RNA, 41 nt, synthetic construct
  source 1..41: mol_type = other RNA
agatctgcaaaccccgctttgaagatattccgggattttct

SEQ ID NO: 10296 - RNA, 41 nt, synthetic construct
  source 1..41: mol_type = other RNA
tctgggctgacgtggtggagatcggcaaaccccactttgaa

SEQ ID NO: 10297 - RNA, 41 nt, synthetic construct
  source 1..41: mol_type = other RNA
ctgcagtgatggacgtcggagaactccactttgaagaagtt

SEQ ID NO: 10298 - RNA, 41 nt, synthetic construct
  source 1..41: mol_type = other RNA
tggtggagagcggcagaccccactttgtagaaattcctgga

SEQ ID NO: 10299 - RNA, 42 nt, synthetic construct
  source 1..42: mol_type = other RNA
ctgcagtggcagggatcggcaaaccccaactttgaagaagtt

SEQ ID NO: 10300 - RNA, 31 nt, synthetic construct
  source 1..31: mol_type = other RNA
ggagatcgacgaaccccactatgaagaagtt

SEQ ID NO: 10301 - RNA, 31 nt, synthetic construct
  source 1..31: mol_type = other RNA
gatctgcaaacccgactttgaagatgttcct

SEQ ID NO: 10302 - RNA, 41 nt, synthetic construct
  source 1..41: mol_type = other RNA
ctgcagtgatggacgtcggaaaactccactctgaagaagtt

SEQ ID NO: 10303 - RNA, 31 nt, synthetic construct
  source 1..31: mol_type = other RNA
tgcagcggtggagatcggtaaaccccacttt

SEQ ID NO: 10304 - RNA, 31 nt, synthetic construct
  source 1..31: mol_type = other RNA
gatctgcagaccccacttttttgaagttcct

SEQ ID NO: 10305 - RNA, 31 nt, synthetic construct
  source 1..31: mol_type = other RNA
gatctacacctccaactttgaagacgttcct

SEQ ID NO: 10306 - RNA, 30 nt, synthetic construct
  source 1..30: mol_type = other RNA
caaactccactttgagaaatagcgcgattt

SEQ ID NO: 10307 - RNA, 42 nt, synthetic construct
  source 1..42: mol_type = other RNA
tctgggctgcagtggtggagctaggcaaggctccactttgaa

SEQ ID NO: 10308 - RNA, 54 nt, synthetic construct
  source 1..54: mol_type = other RNA
ctgcaaacccgtctttgaagtaaaaaaattctacaagcgaggggagttctgttg

SEQ ID NO: 10309 - RNA, 31 nt, synthetic construct
  source 1..31: mol_type = other RNA
tgcagtggtggagatcggaacaccccacttt

SEQ ID NO: 10310 - RNA, 43 nt, synthetic construct
  source 1..43: mol_type = other RNA
agatctgcaaaccccagactttaaagaagttccgggattttct

SEQ ID NO: 10311 - RNA, 41 nt, synthetic construct
  source 1..41: mol_type = other RNA
ctgcagtggtgacggtcggtgaacccctctttgaagaagtt

SEQ ID NO: 10312 - RNA, 46 nt, synthetic construct
  source 1..46: mol_type = other RNA
ctgcaaaccccaactttgacgtccgcagttcgaggattttctgttg

SEQ ID NO: 10313 - RNA, 31 nt, synthetic construct
  source 1..31: mol_type = other RNA
tgcagtggtggagattggtaaaccccacttt

SEQ ID NO: 10314 - RNA, 41 nt, synthetic construct
  source 1..41: mol_type = other RNA
ctgcagtggtggagatcggcacacccccctatgaagaagtt

SEQ ID NO: 10315 - RNA, 31 nt, synthetic construct
  source 1..31: mol_type = other RNA
tgcagtggtggagatcggcgaacccgacttt

SEQ ID NO: 10316 - RNA, 31 nt, synthetic construct
  source 1..31: mol_type = other RNA
gatctgcccaccccacgtggaagaagttcct

SEQ ID NO: 10317 - RNA, 41 nt, synthetic construct
  source 1..41: mol_type = other RNA
tggtggagaccggcaaaccccactttgaacaagttcctgga

SEQ ID NO: 10318 - RNA, 42 nt, synthetic construct
  source 1..42: mol_type = other RNA
tctgggctgcagtggtggagcgaggcaatgctccactttgaa

SEQ ID NO: 10319 - RNA, 41 nt, synthetic construct
  source 1..41: mol_type = other RNA
ctgcagtggtggagattggctgctcccactttgaagaagtt

SEQ ID NO: 10320 - RNA, 41 nt, synthetic construct
  source 1..41: mol_type = other RNA
ctgcagtggtcgagatcggcgggccccaacttgaagaagtt

SEQ ID NO: 10321 - RNA, 41 nt, synthetic construct
  source 1..41: mol_type = other RNA
ctgcaaacccccctatgaagaagttccgtgattttctgttg

SEQ ID NO: 10322 - RNA, 60 nt, synthetic construct
  source 1..60: mol_type = other RNA
tctgggctgcagtggtgagatttgcccataatacacccccaccccaccccccactttgaa

SEQ ID NO: 10323 - RNA, 41 nt, synthetic construct
  source 1..41: mol_type = other RNA
ctgcaaaccccaatttgaaacagttctgaaattttctgttg

SEQ ID NO: 10324 - RNA, 31 nt, synthetic construct
  source 1..31: mol_type = other RNA
caaaccccactttgatgaagctccgggattt

SEQ ID NO: 10325 - RNA, 31 nt, synthetic construct
  source 1..31: mol_type = other RNA
caaaccccactttgaagaagttccgagattt

SEQ ID NO: 10326 - RNA, 41 nt, synthetic construct
  source 1..41: mol_type = other RNA
agatctgcaaggctccaggcaaagaagtttcgggattttct

SEQ ID NO: 10327 - RNA, 41 nt, synthetic construct
  source 1..41: mol_type = other RNA
agatctgccaacccccctttgacgaagttccgggattttct

SEQ ID NO: 10328 - RNA, 40 nt, synthetic construct
  source 1..40: mol_type = other RNA
ctgcaaactccaagccaagaagtttcgggattttctgttg

SEQ ID NO: 10329 - RNA, 41 nt, synthetic construct
  source 1..41: mol_type = other RNA
agatctgcagactccaaatagaggaagttccgggattttct

SEQ ID NO: 10330 - RNA, 31 nt, synthetic construct
  source 1..31: mol_type = other RNA
gatctgcaaaccccactttgatgaagttcct

SEQ ID NO: 10331 - RNA, 31 nt, synthetic construct
  source 1..31: mol_type = other RNA
gatctacaaaccccactttgtcgaagttcct

SEQ ID NO: 10332 - RNA, 41 nt, synthetic construct
  source 1..41: mol_type = other RNA
tctgggctgcagtgatgaatgtaggcatgctccactttgaa

SEQ ID NO: 10333 - RNA, 41 nt, synthetic construct
  source 1..41: mol_type = other RNA
ctgcagtggcggaacttggcaattcccactttgaagaagtt

SEQ ID NO: 10334 - RNA, 31 nt, synthetic construct
  source 1..31: mol_type = other RNA
caaacccgaatttgaaggagttgagggattt

SEQ ID NO: 10335 - RNA, 41 nt, synthetic construct
  source 1..41: mol_type = other RNA
agatctgcaaatcccactttgacgaagttccgggattttct

SEQ ID NO: 10336 - RNA, 31 nt, synthetic construct
  source 1..31: mol_type = other RNA
tgcaggggtggagatcgaagaacccgacttt

SEQ ID NO: 10337 - RNA, 31 nt, synthetic construct
  source 1..31: mol_type = other RNA
ggagatcggcgggccccaacttgaagaagtt

SEQ ID NO: 10338 - RNA, 41 nt, synthetic construct
  source 1..41: mol_type = other RNA
ctgcagtggttcagatcgacaattcccacttcgaagaagtt

SEQ ID NO: 10339 - RNA, 31 nt, synthetic construct
  source 1..31: mol_type = other RNA
gatctgcaaaccccactttgaacaagttcct

SEQ ID NO: 10340 - RNA, 46 nt, synthetic construct
  source 1..46: mol_type = other RNA
tctgggctgcagtggtggagatcggcaaactaaaaaccactttgaa

SEQ ID NO: 10341 - RNA, 41 nt, synthetic construct
  source 1..41: mol_type = other RNA
ctgcagtgatggacgtcgacacctccaactttgaagaagtt

SEQ ID NO: 10342 - RNA, 31 nt, synthetic construct
  source 1..31: mol_type = other RNA
ggagattggcaggctccactttgaagaagtt

SEQ ID NO: 10343 - RNA, 31 nt, synthetic construct
  source 1..31: mol_type = other RNA
caaactccactttgagacagttccgggattt

SEQ ID NO: 10344 - RNA, 31 nt, synthetic construct
  source 1..31: mol_type = other RNA
gatctgaaaactccactctgagaaagttcct

SEQ ID NO: 10345 - RNA, 36 nt, synthetic construct
  source 1..36: mol_type = other RNA
gatctgcaaaccccaactttgacgtccgcagttcct

SEQ ID NO: 10346 - RNA, 41 nt, synthetic construct
  source 1..41: mol_type = other RNA
ctgcagtggtggaggtcgcaaaactccacttcgaagaagtt

SEQ ID NO: 10347 - RNA, 43 nt, synthetic construct
  source 1..43: mol_type = other RNA
tggtggagaacggcaaaccccagactttaaagaagttcctgga

SEQ ID NO: 10348 - RNA, 41 nt, synthetic construct
  source 1..41: mol_type = other RNA
ctgcaaacccgaatttgaaggagttgaggaattttctgttg

SEQ ID NO: 10349 - RNA, 41 nt, synthetic construct
  source 1..41: mol_type = other RNA
tggtggaggtcggcaaatcccactttgacgaagttcctgga

SEQ ID NO: 10350 - RNA, 30 nt, synthetic construct
  source 1..30: mol_type = other RNA
caaaccccactttgatgagttccgggattt

SEQ ID NO: 10351 - RNA, 38 nt, synthetic construct
  source 1..38: mol_type = other RNA
ctgcagtggtggaacgtcgaccccactttgaagaagtt

SEQ ID NO: 10352 - RNA, 41 nt, synthetic construct
  source 1..41: mol_type = other RNA
agatctgcaatgctccaatttgagaagtttcgggattttct

SEQ ID NO: 10353 - RNA, 54 nt, synthetic construct
  source 1..54: mol_type = other RNA
ctgcaaactgagctatgaccaggggcctgataggattgatgggattttctgttg

SEQ ID NO: 10354 - RNA, 31 nt, synthetic construct
  source 1..31: mol_type = other RNA
gatctgcagaccccactttgtagaaattcct

SEQ ID NO: 10355 - RNA, 41 nt, synthetic construct
  source 1..41: mol_type = other RNA
tggtggagatcggtaaaccccactttcaagctattcctgga

SEQ ID NO: 10356 - RNA, 31 nt, synthetic construct
  source 1..31: mol_type = other RNA
tgcagtggtgggcatcggcgaaccccacttt

SEQ ID NO: 10357 - RNA, 41 nt, synthetic construct
  source 1..41: mol_type = other RNA
agatctgcgggccccaatccgaggtagttccgagattttct

SEQ ID NO: 10358 - RNA, 31 nt, synthetic construct
  source 1..31: mol_type = other RNA
tgcagtcgtggagatcgacaaaccccacttt

SEQ ID NO: 10359 - RNA, 41 nt, synthetic construct
  source 1..41: mol_type = other RNA
ctgcaaaccccactttgaacaagttccgggattttctgttg

SEQ ID NO: 10360 - RNA, 31 nt, synthetic construct
  source 1..31: mol_type = other RNA
ggagatcggcaaatcccactttgaagaagtt

SEQ ID NO: 10361 - RNA, 41 nt, synthetic construct
  source 1..41: mol_type = other RNA
ctgcaaaccccactatgaagaagttccgggattttctgttg

SEQ ID NO: 10362 - RNA, 31 nt, synthetic construct
  source 1..31: mol_type = other RNA
tgcagtggtggaactcggcaaaccccacttt

SEQ ID NO: 10363 - RNA, 40 nt, synthetic construct
  source 1..40: mol_type = other RNA
ctgcagtgtggagcttggcaggctccactttgaagaagtt

SEQ ID NO: 10364 - RNA, 41 nt, synthetic construct
  source 1..41: mol_type = other RNA
ctgcagtgatggatatcggaaaactcccctttgaagaagtt

SEQ ID NO: 10365 - RNA, 42 nt, synthetic construct
  source 1..42: mol_type = other RNA
agatctgcaaactctgttttgacagaagttccgggattttct

SEQ ID NO: 10366 - RNA, 41 nt, synthetic construct
  source 1..41: mol_type = other RNA
ctgcagtggtggagatcggcaaaccaccctctgaagaagtt

SEQ ID NO: 10367 - RNA, 31 nt, synthetic construct
  source 1..31: mol_type = other RNA
tgcagtggtgggggtaggcaaaccccacttt

SEQ ID NO: 10368 - RNA, 41 nt, synthetic construct
  source 1..41: mol_type = other RNA
tctgggctacagtaggtgccgtcggcagactccactttgaa

SEQ ID NO: 10369 - RNA, 31 nt, synthetic construct
  source 1..31: mol_type = other RNA
caaaccccactttggagaagcgccgggattt

SEQ ID NO: 10370 - RNA, 31 nt, synthetic construct
  source 1..31: mol_type = other RNA
ggagattggtaggtccctccttgaagaagtt

SEQ ID NO: 10371 - RNA, 42 nt, synthetic construct
  source 1..42: mol_type = other RNA
tctgggctgcagtggtggagctgggcaaggctccactttgaa

SEQ ID NO: 10372 - RNA, 42 nt, synthetic construct
  source 1..42: mol_type = other RNA
tggtggaggtaggcaaaccccactttgaccgaagttcctgga

SEQ ID NO: 10373 - RNA, 41 nt, synthetic construct
  source 1..41: mol_type = other RNA
tggtggagatcggcaaaccccactttgaaggagttcctgga

SEQ ID NO: 10374 - RNA, 40 nt, synthetic construct
  source 1..40: mol_type = other RNA
tggtggagctcggcagaccccactttgatgagttcctgga

SEQ ID NO: 10375 - RNA, 31 nt, synthetic construct
  source 1..31: mol_type = other RNA
caaactccaactggaggaagttccgagattt

SEQ ID NO: 10376 - RNA, 41 nt, synthetic construct
  source 1..41: mol_type = other RNA
tggtggagttcggcagaccccacttttttgaagttcctgga

SEQ ID NO: 10377 - RNA, 41 nt, synthetic construct
  source 1..41: mol_type = other RNA
ctgcaaacccccctatgaagaagttccgggattttctgttg

SEQ ID NO: 10378 - RNA, 41 nt, synthetic construct
  source 1..41: mol_type = other RNA
ctgcaaactccaattagaggaaattccgtgattttctgttg

SEQ ID NO: 10379 - RNA, 31 nt, synthetic construct
  source 1..31: mol_type = other RNA
caaactccaattagaggaaattccgtgattt

SEQ ID NO: 10380 - RNA, 31 nt, synthetic construct
  source 1..31: mol_type = other RNA
ggagataggcaaggctccaagccaagaagtt

SEQ ID NO: 10381 - RNA, 41 nt, synthetic construct
  source 1..41: mol_type = other RNA
agatctgcaaactcctatttgcaggagtaccgggattttct

SEQ ID NO: 10382 - RNA, 41 nt, synthetic construct
  source 1..41: mol_type = other RNA
ctgcaaaccccacttcgaaggagttccgagattttctgttg

SEQ ID NO: 10383 - RNA, 41 nt, synthetic construct
  source 1..41: mol_type = other RNA
tggtggaggtcggccgaccccactttgaagaagttcctgga

SEQ ID NO: 10384 - RNA, 31 nt, synthetic construct
  source 1..31: mol_type = other RNA
gatctgcagaccccactttgaagaagttcct

SEQ ID NO: 10385 - RNA, 31 nt, synthetic construct
  source 1..31: mol_type = other RNA
tgcagtggtggagatcggcaaaccccacttt

SEQ ID NO: 10386 - RNA, 32 nt, synthetic construct
  source 1..32: mol_type = other RNA
tgcagtggtggagatcggcaaaccaccacttt

SEQ ID NO: 10387 - RNA, 41 nt, synthetic construct
  source 1..41: mol_type = other RNA
ctgcaaactccactttgagacagttccggcattttctgttg

SEQ ID NO: 10388 - RNA, 43 nt, synthetic construct
  source 1..43: mol_type = other RNA
tctgggctgccagatggtggcgattgcaaaaccccactttgaa

SEQ ID NO: 10389 - RNA, 41 nt, synthetic construct
  source 1..41: mol_type = other RNA
agatctgcaaaccccactttgaagaagttctgggattttct

SEQ ID NO: 10390 - RNA, 31 nt, synthetic construct
  source 1..31: mol_type = other RNA
ggagagcggcagaccccactttgtagaagtt

SEQ ID NO: 10391 - RNA, 41 nt, synthetic construct
  source 1..41: mol_type = other RNA
ctgcagtgatgaatgtaggcatgctccacttagaagaagtt

SEQ ID NO: 10392 - RNA, 31 nt, synthetic construct
  source 1..31: mol_type = other RNA
caaacccaactttgaagaagttccgggattt

SEQ ID NO: 10393 - RNA, 42 nt, synthetic construct
  source 1..42: mol_type = other RNA
agatctgcaaaccccaccttacaagaagttccgggattttct

SEQ ID NO: 10394 - RNA, 41 nt, synthetic construct
  source 1..41: mol_type = other RNA
agatctgcgggccccaacttgaaggagttccgggattttct

SEQ ID NO: 10395 - RNA, 41 nt, synthetic construct
  source 1..41: mol_type = other RNA
tggtggagctcggcaaaccccactttgatgaagttcctgga

SEQ ID NO: 10396 - RNA, 31 nt, synthetic construct
  source 1..31: mol_type = other RNA
gatctgcgggccccaatccgaggtagttcct

SEQ ID NO: 10397 - RNA, 41 nt, synthetic construct
  source 1..41: mol_type = other RNA
tggtggagatcggcaacccccactttgaaaaagttcctgga

SEQ ID NO: 10398 - RNA, 41 nt, synthetic construct
  source 1..41: mol_type = other RNA
agatctgcaggtccctccttgaagaagttccgggattttct

SEQ ID NO: 10399 - RNA, 31 nt, synthetic construct
  source 1..31: mol_type = other RNA
gatctgcgaacccgaatttgaaggagttcct

SEQ ID NO: 10400 - RNA, 31 nt, synthetic construct
  source 1..31: mol_type = other RNA
gatctgctgctcccactttggagaagttcct

SEQ ID NO: 10401 - RNA, 41 nt, synthetic construct
  source 1..41: mol_type = other RNA
agatctgcacttcccactttgaagaagttccgggattttct

SEQ ID NO: 10402 - RNA, 39 nt, synthetic construct
  source 1..39: mol_type = other RNA
tggtggaggtcggcaccccactttgaagaagttcctgga

SEQ ID NO: 10403 - RNA, 41 nt, synthetic construct
  source 1..41: mol_type = other RNA
ctgcaaaccccactttgaagaagatccgggattttctgttg

SEQ ID NO: 10404 - RNA, 41 nt, synthetic construct
  source 1..41: mol_type = other RNA
ctgcagtggcggagatcggcaaggtccaatttgaagaagtt

SEQ ID NO: 10405 - RNA, 41 nt, synthetic construct
  source 1..41: mol_type = other RNA
ctgcaaacccctccttgaagaagttccgggatcttctgttg

SEQ ID NO: 10406 - RNA, 32 nt, synthetic construct
  source 1..32: mol_type = other RNA
gatctgcaaaccccactttgaccgaagttcct

SEQ ID NO: 10407 - RNA, 31 nt, synthetic construct
  source 1..31: mol_type = other RNA
ggagagaggcaaggctccaggcaaagaagtt

SEQ ID NO: 10408 - RNA, 31 nt, synthetic construct
  source 1..31: mol_type = other RNA
gatctgcaaatcccactttgaagaagttcct

SEQ ID NO: 10409 - RNA, 41 nt, synthetic construct
  source 1..41: mol_type = other RNA
tggtggagatcggcaaatcccactttgaagaagttcctgga

SEQ ID NO: 10410 - RNA, 41 nt, synthetic construct
  source 1..41: mol_type = other RNA
ctgcaaactccactttgaggaagctccgcaattttctgttg

SEQ ID NO: 10411 - RNA, 41 nt, synthetic construct
  source 1..41: mol_type = other RNA
ctgcaaacccaactttgaagaagttccgggcttttctgttg

SEQ ID NO: 10412 - RNA, 41 nt, synthetic construct
  source 1..41: mol_type = other RNA
ctgcaaacccccctttgaaaaagatccgggattttctgttg

SEQ ID NO: 10413 - RNA, 31 nt, synthetic construct
  source 1..31: mol_type = other RNA
ggtggaggtcggccaacccccctttgaagaa

SEQ ID NO: 10414 - RNA, 42 nt, synthetic construct
  source 1..42: mol_type = other RNA
agatctgcaaaccccattttgacagaagtcccgagattttct

SEQ ID NO: 10415 - RNA, 31 nt, synthetic construct
  source 1..31: mol_type = other RNA
ggagaccggcaaaccccactttgaacaagtt

SEQ ID NO: 10416 - RNA, 43 nt, synthetic construct
  source 1..43: mol_type = other RNA
agatctgcaaaccccactatgaagctaatatccgagattttct

SEQ ID NO: 10417 - RNA, 43 nt, synthetic construct
  source 1..43: mol_type = other RNA
ctgcaaaccccagactttaaagaagttccgggattttctgttg

SEQ ID NO: 10418 - RNA, 45 nt, synthetic construct
  source 1..45: mol_type = other RNA
ctgcagtggtggagttcggcaaacgccacaggaaatgaagaagtt

SEQ ID NO: 10419 - RNA, 31 nt, synthetic construct
  source 1..31: mol_type = other RNA
tgcagtggtggagttcggcacacccgacttt

SEQ ID NO: 10420 - RNA, 41 nt, synthetic construct
  source 1..41: mol_type = other RNA
ctgcaaaccccactatgaagaagcttcgggattttctgttg

SEQ ID NO: 10421 - RNA, 41 nt, synthetic construct
  source 1..41: mol_type = other RNA
ctgcaaaccccactttgaagaagttctgggattttctgttg

SEQ ID NO: 10422 - RNA, 40 nt, synthetic construct
  source 1..40: mol_type = other RNA
ctgcagtggtggaactcggcacgccccactgcaagaagtt

SEQ ID NO: 10423 - RNA, 41 nt, synthetic construct
  source 1..41: mol_type = other RNA
agatctgcgaatccctccttgaagaacttccgggattttct

SEQ ID NO: 10424 - RNA, 46 nt, synthetic construct
  source 1..46: mol_type = other RNA
tggtggagatctgcaaaccccaactttgacgtccgcagttcctgga

SEQ ID NO: 10425 - RNA, 31 nt, synthetic construct
  source 1..31: mol_type = other RNA
tgcagtggtggcaatcggcaaaccccacttt

SEQ ID NO: 10426 - RNA, 31 nt, synthetic construct
  source 1..31: mol_type = other RNA
tgcagtggtggagatcggtaaaccccacttt

SEQ ID NO: 10427 - RNA, 31 nt, synthetic construct
  source 1..31: mol_type = other RNA
tgcagtggtggaggtcggccgaccccacttt

SEQ ID NO: 10428 - RNA, 41 nt, synthetic construct
  source 1..41: mol_type = other RNA
tctgggctgtagtggtggagattggtagttccaactttgaa

SEQ ID NO: 10429 - RNA, 31 nt, synthetic construct
  source 1..31: mol_type = other RNA
ggtggagattggtagttccaactttgaagaa

SEQ ID NO: 10430 - RNA, 41 nt, synthetic construct
  source 1..41: mol_type = other RNA
ctgcagtggtggatctcgaaataccccactatgaagaagtt

SEQ ID NO: 10431 - RNA, 41 nt, synthetic construct
  source 1..41: mol_type = other RNA
agatctgcacaccccaatttgaaacagttctgagattttct

SEQ ID NO: 10432 - RNA, 41 nt, synthetic construct
  source 1..41: mol_type = other RNA
ctgcaaacccccctttgacgaagttccgggattttctgttg

SEQ ID NO: 10433 - RNA, 41 nt, synthetic construct
  source 1..41: mol_type = other RNA
ctgcaaactcgactttgaggaagttccgggattttctgttg

SEQ ID NO: 10434 - RNA, 41 nt, synthetic construct
  source 1..41: mol_type = other RNA
tggtggagatcgacaaaccccactttgtcgaagttcctgga

SEQ ID NO: 10435 - RNA, 31 nt, synthetic construct
  source 1..31: mol_type = other RNA
gatctgaagaccccactttgaagaagttcct

SEQ ID NO: 10436 - RNA, 42 nt, synthetic construct
  source 1..42: mol_type = other RNA
ctgcagtggtggagttgacaatggctccaatttgaagaagtt

SEQ ID NO: 10437 - RNA, 42 nt, synthetic construct
  source 1..42: mol_type = other RNA
tctgggctgcagtggtcgagcgaggcaaggctccactttgaa

SEQ ID NO: 10438 - RNA, 42 nt, synthetic construct
  source 1..42: mol_type = other RNA
ctgcagtggtcgagcgaggcaaggctccaggcaaaagaagtt

SEQ ID NO: 10439 - RNA, 41 nt, synthetic construct
  source 1..41: mol_type = other RNA
ctgcaaactccactctgagaaagttccggcattttctgttg

SEQ ID NO: 10440 - RNA, 41 nt, synthetic construct
  source 1..41: mol_type = other RNA
agatctgcgaaccctacggtgaagaagtagagggattttct

SEQ ID NO: 10441 - RNA, 41 nt, synthetic construct
  source 1..41: mol_type = other RNA
tggtggagatcgacaattcccacttcggagaggttcctgga

SEQ ID NO: 10442 - RNA, 31 nt, synthetic construct
  source 1..31: mol_type = other RNA
gatctaaataccccactatgaagaagttcct

SEQ ID NO: 10443 - RNA, 31 nt, synthetic construct
  source 1..31: mol_type = other RNA
gatctgcaggacccactgtgaagaagttcct

SEQ ID NO: 10444 - RNA, 41 nt, synthetic construct
  source 1..41: mol_type = other RNA
ctgcaaaccccaatccgaggtagttccgaaattttctgttg

SEQ ID NO: 10445 - RNA, 41 nt, synthetic construct
  source 1..41: mol_type = other RNA
ctgcaaaccccacttagaaggagtcctgggattttctgttg

SEQ ID NO: 10446 - RNA, 33 nt, synthetic construct
  source 1..33: mol_type = other RNA
caaaccccactttgtagaaggcttctgggattt

SEQ ID NO: 10447 - RNA, 41 nt, synthetic construct
  source 1..41: mol_type = other RNA
tggtggagatcgaagaacccgactatgaaaaagttcctgga

SEQ ID NO: 10448 - RNA, 38 nt, synthetic construct
  source 1..38: mol_type = other RNA
tggtggaggtcggcacaccccactttgaaattcctgga

SEQ ID NO: 10449 - RNA, 31 nt, synthetic construct
  source 1..31: mol_type = other RNA
ggtggtgattggtaggtccctccttgaagaa

SEQ ID NO: 10450 - RNA, 41 nt, synthetic construct
  source 1..41: mol_type = other RNA
tggtggagattggcaaaccccacattgaagaagttcctgga

SEQ ID NO: 10451 - RNA, 41 nt, synthetic construct
  source 1..41: mol_type = other RNA
agatctgcgaacccgaatttgaaggagttgagggattttct

SEQ ID NO: 10452 - RNA, 41 nt, synthetic construct
  source 1..41: mol_type = other RNA
agatctgcgaacccgactatgaaaaagttccgggattttct

SEQ ID NO: 10453 - RNA, 31 nt, synthetic construct
  source 1..31: mol_type = other RNA
tgcagtggtggaggtcggccaaccccacttt

SEQ ID NO: 10454 - RNA, 41 nt, synthetic construct
  source 1..41: mol_type = other RNA
tctgggctgaagtggtggagatcggcaggacccactttgaa

SEQ ID NO: 10455 - RNA, 41 nt, synthetic construct
  source 1..41: mol_type = other RNA
agatctgcaaggtccaatttgaaattagaccgagattttct

SEQ ID NO: 10456 - RNA, 31 nt, synthetic construct
  source 1..31: mol_type = other RNA
gatctgaacatcccaatttgaggaagttcct

SEQ ID NO: 10457 - RNA, 41 nt, synthetic construct
  source 1..41: mol_type = other RNA
tggtggagatcggcccaccccacgtggaagaagttcctgga

SEQ ID NO: 10458 - RNA, 31 nt, synthetic construct
  source 1..31: mol_type = other RNA
gatctgcaaaccccaccttgaagaagttcct

SEQ ID NO: 10459 - RNA, 41 nt, synthetic construct
  source 1..41: mol_type = other RNA
agatctgcgaacccctctttgaagaagttccgggattttct

SEQ ID NO: 10460 - RNA, 55 nt, synthetic construct
  source 1..55: mol_type = other RNA
ctgcagtggtggagtgatctgcaaaatgagctatgaccaggggcctgaagaagtt

SEQ ID NO: 10461 - RNA, 42 nt, synthetic construct
  source 1..42: mol_type = other RNA
ctgcaaactctgttttgacagaagttccgggattttctgttg

SEQ ID NO: 10462 - RNA, 30 nt, synthetic construct
  source 1..30: mol_type = other RNA
gatctgcaaccccactttgtcgaagttcct

SEQ ID NO: 10463 - RNA, 42 nt, synthetic construct
  source 1..42: mol_type = other RNA
ctgcaaaccccactttgaccgaagtcccgggattttctgttg

SEQ ID NO: 10464 - RNA, 31 nt, synthetic construct
  source 1..31: mol_type = other RNA
ggagatcggcaaacccgactttgaagaagtt

SEQ ID NO: 10465 - RNA, 55 nt, synthetic construct
  source 1..55: mol_type = other RNA
tggtggagttctgagagccccacacacacacacacttagaatttgagttcctgga

SEQ ID NO: 10466 - RNA, 31 nt, synthetic construct
  source 1..31: mol_type = other RNA
gatctgcacttcccactttgaagaagttcct

SEQ ID NO: 10467 - RNA, 41 nt, synthetic construct
  source 1..41: mol_type = other RNA
agatctgcagttccaactttgaagaagttccgggattttct

SEQ ID NO: 10468 - RNA, 41 nt, synthetic construct
  source 1..41: mol_type = other RNA
tggtggagatcggcgaatccctccttgaagaacttcctgga

SEQ ID NO: 10469 - RNA, 31 nt, synthetic construct
  source 1..31: mol_type = other RNA
caaaccccactttgaagaggtttagggattt

SEQ ID NO: 10470 - RNA, 41 nt, synthetic construct
  source 1..41: mol_type = other RNA
ctgcaaaccccaccttgaagaagttccgggattttctgttg

SEQ ID NO: 10471 - RNA, 42 nt, synthetic construct
  source 1..42: mol_type = other RNA
agatctgcaaaaccccactatgaagaagcttcgggattttct

SEQ ID NO: 10472 - RNA, 31 nt, synthetic construct
  source 1..31: mol_type = other RNA
tgcagtggcggaacttggcaattcccacttt

SEQ ID NO: 10473 - RNA, 42 nt, synthetic construct
  source 1..42: mol_type = other RNA
tggtggagataggtaaaccccattttgacagaagttcctgga

SEQ ID NO: 10474 - RNA, 31 nt, synthetic construct
  source 1..31: mol_type = other RNA
tgcagtggtggaaatcggcaaactccacttt

SEQ ID NO: 10475 - RNA, 41 nt, synthetic construct
  source 1..41: mol_type = other RNA
ctgcaaactccacttcgaagaagttccgggattttctgttg

SEQ ID NO: 10476 - RNA, 42 nt, synthetic construct
  source 1..42: mol_type = other RNA
ctgcagtggtggagacgagcaatgctccactttgaagaagtt

SEQ ID NO: 10477 - RNA, 41 nt, synthetic construct
  source 1..41: mol_type = other RNA
tctgggctgcagtgatggccaaaggcggactccactttgaa

SEQ ID NO: 10478 - RNA, 42 nt, synthetic construct
  source 1..42: mol_type = other RNA
ctgcagtggtggagcgaggcaatgctccaatttgaagaagtt

SEQ ID NO: 10479 - RNA, 41 nt, synthetic construct
  source 1..41: mol_type = other RNA
ctgcaaacccaactttgaagacgttccgggattttctgttg

SEQ ID NO: 10480 - RNA, 41 nt, synthetic construct
  source 1..41: mol_type = other RNA
ctgcaaactcccctttgagaaagttgcggcattttctgttg

SEQ ID NO: 10481 - RNA, 32 nt, synthetic construct
  source 1..32: mol_type = other RNA
ggtggagctgggcaaggctccaatttgaagaa

SEQ ID NO: 10482 - RNA, 32 nt, synthetic construct
  source 1..32: mol_type = other RNA
ggagataggcaaaccccactttgaccgaagtt

SEQ ID NO: 10483 - RNA, 31 nt, synthetic construct
  source 1..31: mol_type = other RNA
gatctacgaaccccactatgaagaagttcct

SEQ ID NO: 10484 - RNA, 41 nt, synthetic construct
  source 1..41: mol_type = other RNA
tggtggagatcgacgaaccccactatgaagaagttcctgga

SEQ ID NO: 10485 - RNA, 31 nt, synthetic construct
  source 1..31: mol_type = other RNA
caaaccccactttgaagaagttccgggattt

SEQ ID NO: 10486 - RNA, 41 nt, synthetic construct
  source 1..41: mol_type = other RNA
ctgcagtggtggagattggtagttccaactttgaagaagtt

SEQ ID NO: 10487 - RNA, 42 nt, synthetic construct
  source 1..42: mol_type = other RNA
ctgcaaaccccaccttacaagaagttccggggttttctgttg

SEQ ID NO: 10488 - RNA, 32 nt, synthetic construct
  source 1..32: mol_type = other RNA
gatctgaacacccccctttgatagaagttcct

SEQ ID NO: 10489 - RNA, 41 nt, synthetic construct
  source 1..41: mol_type = other RNA
ctgcaaactccaccttgaagaagttccgagatcttctgttg

SEQ ID NO: 10490 - RNA, 41 nt, synthetic construct
  source 1..41: mol_type = other RNA
agatctgcagaccccactttgaagaagatccgggattttct

SEQ ID NO: 10491 - RNA, 43 nt, synthetic construct
  source 1..43: mol_type = other RNA
tctgggctgccaggtggtggagatcggcagaccccactttgaa

SEQ ID NO: 10492 - RNA, 41 nt, synthetic construct
  source 1..41: mol_type = other RNA
ctgcagtggtcggcatcggcccaccccacgtggaagaagtt

SEQ ID NO: 10493 - RNA, 41 nt, synthetic construct
  source 1..41: mol_type = other RNA
tggtggagatcggcaacccccactttgaagaggttcctgga

SEQ ID NO: 10494 - RNA, 31 nt, synthetic construct
  source 1..31: mol_type = other RNA
tgcagtggtggaaatcggcagcctccacttt

SEQ ID NO: 10495 - RNA, 31 nt, synthetic construct
  source 1..31: mol_type = other RNA
tgcagtggtaaaggtcggcacaccccacttt

SEQ ID NO: 10496 - RNA, 31 nt, synthetic construct
  source 1..31: mol_type = other RNA
gatctgcaaaccccactatgaagctattcct

SEQ ID NO: 10497 - RNA, 41 nt, synthetic construct
  source 1..41: mol_type = other RNA
tggtggaggtcggtgaacccctctttgaagaagttcctgga

SEQ ID NO: 10498 - RNA, 43 nt, synthetic construct
  source 1..43: mol_type = other RNA
agatctgcaggccccactttaaaaagacgttttgggattttct

SEQ ID NO: 10499 - RNA, 31 nt, synthetic construct
  source 1..31: mol_type = other RNA
caaaccccactatgaagaagcttcgggattt

SEQ ID NO: 10500 - RNA, 42 nt, synthetic construct
  source 1..42: mol_type = other RNA
tctgggctgcagtggtggagctgacaacagcgccactttgaa

SEQ ID NO: 10501 - RNA, 41 nt, synthetic construct
  source 1..41: mol_type = other RNA
tctgggctgcagtagtggagttcgtcaaaaccgactttgaa

SEQ ID NO: 10502 - RNA, 40 nt, synthetic construct
  source 1..40: mol_type = other RNA
agatctgcacgccccactgcaaggactttcgggattttct

SEQ ID NO: 10503 - RNA, 41 nt, synthetic construct
  source 1..41: mol_type = other RNA
tggtggagatcggcaaaccccactttgaagaagttcctgga

SEQ ID NO: 10504 - RNA, 41 nt, synthetic construct
  source 1..41: mol_type = other RNA
ctgcaaaccctacggtgaagaagtagaggaattttctgttg

SEQ ID NO: 10505 - RNA, 31 nt, synthetic construct
  source 1..31: mol_type = other RNA
caaacccgactatgaaaaagttccgggattt

SEQ ID NO: 10506 - RNA, 29 nt, synthetic construct
  source 1..29: mol_type = other RNA
gatctgcaccccactttgaagaagttcct

SEQ ID NO: 10507 - RNA, 31 nt, synthetic construct
  source 1..31: mol_type = other RNA
gatctgcacacccccctatgaagaagttcct

SEQ ID NO: 10508 - RNA, 41 nt, synthetic construct
  source 1..41: mol_type = other RNA
tggtggagatcggcacacccccctatgaagaagttcctgga

SEQ ID NO: 10509 - RNA, 32 nt, synthetic construct
  source 1..32: mol_type = other RNA
gatctgtaaaccccattttgacagaagttcct

SEQ ID NO: 10510 - RNA, 41 nt, synthetic construct
  source 1..41: mol_type = other RNA
tggtggagataggccaactcgactttgaggaagttcctgga

SEQ ID NO: 10511 - RNA, 31 nt, synthetic construct
  source 1..31: mol_type = other RNA
ggagatcggcaaactccaccttgaagaagtt

SEQ ID NO: 10512 - RNA, 40 nt, synthetic construct
  source 1..40: mol_type = other RNA
ctgcaaaccccaatttgaggaagttccgggatttctgttg

SEQ ID NO: 10513 - RNA, 31 nt, synthetic construct
  source 1..31: mol_type = other RNA
caaaccccacgtggaagaagttccgagattt

SEQ ID NO: 10514 - RNA, 41 nt, synthetic construct
  source 1..41: mol_type = other RNA
ctgcaaactccaatttgtagaagttacgggattttctgttg

SEQ ID NO: 10515 - RNA, 41 nt, synthetic construct
  source 1..41: mol_type = other RNA
agatctgcagactccactgtaaggaagttccgggattttct

SEQ ID NO: 10516 - RNA, 31 nt, synthetic construct
  source 1..31: mol_type = other RNA
caaaccccaccttgaagaagttccgggattt

SEQ ID NO: 10517 - RNA, 31 nt, synthetic construct
  source 1..31: mol_type = other RNA
ggtggaaatcggcaccccccactttcaagaa

SEQ ID NO: 10518 - RNA, 41 nt, synthetic construct
  source 1..41: mol_type = other RNA
tggtggagatcggcaccccccactttctagaagttcctgga

SEQ ID NO: 10519 - RNA, 32 nt, synthetic construct
  source 1..32: mol_type = other RNA
tgcagtggtggagctgggcaaggctccacttt

SEQ ID NO: 10520 - RNA, 41 nt, synthetic construct
  source 1..41: mol_type = other RNA
ctgcaaaccccactttgaagaagttccgggcttttctgttg

SEQ ID NO: 10521 - RNA, 31 nt, synthetic construct
  source 1..31: mol_type = other RNA
ggagatcggcacacccgactttgaagaagtt

SEQ ID NO: 10522 - RNA, 41 nt, synthetic construct
  source 1..41: mol_type = other RNA
agatctgcacacccccctatgaagaagttccgggattttct

SEQ ID NO: 10523 - RNA, 31 nt, synthetic construct
  source 1..31: mol_type = other RNA
ggtggagctcggcacacccccctatgaagaa

SEQ ID NO: 10524 - RNA, 41 nt, synthetic construct
  source 1..41: mol_type = other RNA
ctgcagtgatggctgtcgacccgccccactttgaagaagtt

SEQ ID NO: 10525 - RNA, 40 nt, synthetic construct
  source 1..40: mol_type = other RNA
ctgcaaacccccttggaggatgatccgggattttctgttg

SEQ ID NO: 10526 - RNA, 31 nt, synthetic construct
  source 1..31: mol_type = other RNA
tgcagtggtcgagatcggcggaccccacttt

SEQ ID NO: 10527 - RNA, 31 nt, synthetic construct
  source 1..31: mol_type = other RNA
gatctgcgaaccccagcttgaagaagttcct

SEQ ID NO: 10528 - RNA, 43 nt, synthetic construct
  source 1..43: mol_type = other RNA
ctgcaaaccccactttgaagaagttccgggcccttttctgttg

SEQ ID NO: 10529 - RNA, 31 nt, synthetic construct
  source 1..31: mol_type = other RNA
tgcagtggtggagattggctgctcccacttt

SEQ ID NO: 10530 - RNA, 31 nt, synthetic construct
  source 1..31: mol_type = other RNA
gatctgcaaacccccctttgaacaagttcct

SEQ ID NO: 10531 - RNA, 42 nt, synthetic construct
  source 1..42: mol_type = other RNA
tggtggagattggtaaaccccaccttacaagaagttcctgga

SEQ ID NO: 10532 - RNA, 41 nt, synthetic construct
  source 1..41: mol_type = other RNA
ctgcaaaccccaacttgaaggagttccgggattttctgttg

SEQ ID NO: 10533 - RNA, 41 nt, synthetic construct
  source 1..41: mol_type = other RNA
ctgcaaaccccacttcggagaggttacgggattttctgttg

SEQ ID NO: 10534 - RNA, 41 nt, synthetic construct
  source 1..41: mol_type = other RNA
tggtggaggtcggccaacccccctttgacgaagttcctgga

SEQ ID NO: 10535 - RNA, 41 nt, synthetic construct
  source 1..41: mol_type = other RNA
ctgcagtggtggagatcggcaggacccactgtgaagaagtt

SEQ ID NO: 10536 - RNA, 40 nt, synthetic construct
  source 1..40: mol_type = other RNA
agatctgcagaccccactttgatgagttccgggattttct

SEQ ID NO: 10537 - RNA, 31 nt, synthetic construct
  source 1..31: mol_type = other RNA
tgcagtggtggggataggtaaaccccacttt

SEQ ID NO: 10538 - RNA, 41 nt, synthetic construct
  source 1..41: mol_type = other RNA
tggtggagatcggcagaccccactttgaagaagttcctgga

SEQ ID NO: 10539 - RNA, 45 nt, synthetic construct
  source 1..45: mol_type = other RNA
tggtggagatctcaaagccccacttcaacaaaagaagttcctgga

SEQ ID NO: 10540 - RNA, 30 nt, synthetic construct
  source 1..30: mol_type = other RNA
gatctgcagactccactttgagaaattcct

SEQ ID NO: 10541 - RNA, 41 nt, synthetic construct
  source 1..41: mol_type = other RNA
ctgcaaactctacttcgaggaagttccgggattttctgttg

SEQ ID NO: 10542 - RNA, 41 nt, synthetic construct
  source 1..41: mol_type = other RNA
tggtggagatcggcaaaccccactatgaagctattcctgga

SEQ ID NO: 10543 - RNA, 31 nt, synthetic construct
  source 1..31: mol_type = other RNA
caaactccactgtaaggaagttccgggattt

SEQ ID NO: 10544 - RNA, 31 nt, synthetic construct
  source 1..31: mol_type = other RNA
ggagatcgactagatccactttgaggaagtt

SEQ ID NO: 10545 - RNA, 31 nt, synthetic construct
  source 1..31: mol_type = other RNA
tgcagtggtggagttcggcaaacgccacttt

SEQ ID NO: 10546 - RNA, 31 nt, synthetic construct
  source 1..31: mol_type = other RNA
gatctgcaacccccactttgaaaaagttcct

SEQ ID NO: 10547 - RNA, 43 nt, synthetic construct
  source 1..43: mol_type = other RNA
ctgcaaaccccactttaaaaagacgttttgggattttctgttg

SEQ ID NO: 10548 - RNA, 33 nt, synthetic construct
  source 1..33: mol_type = other RNA
gatctgaaggccccactttaaaaagacgttcct

SEQ ID NO: 10549 - RNA, 31 nt, synthetic construct
  source 1..31: mol_type = other RNA
gatctgcaaggctccaagccaagaagttcct

SEQ ID NO: 10550 - RNA, 57 nt, synthetic construct
  source 1..57: mol_type = other RNA
ctgcaaaccccacacacacacacacttagaatttgagttggttgggaacttctgttg

SEQ ID NO: 10551 - RNA, 41 nt, synthetic construct
  source 1..41: mol_type = other RNA
agatctgcaaaccccactttcaagctattctgggattttct

SEQ ID NO: 10552 - RNA, 31 nt, synthetic construct
  source 1..31: mol_type = other RNA
ggtgggcatcggcgaaccccagcttgaagaa

SEQ ID NO: 10553 - RNA, 31 nt, synthetic construct
  source 1..31: mol_type = other RNA
ggagattggcaaaccccacattgaagaagtt

SEQ ID NO: 10554 - RNA, 31 nt, synthetic construct
  source 1..31: mol_type = other RNA
gatctgcaaaccccacattgaagaagttcct

SEQ ID NO: 10555 - RNA, 32 nt, synthetic construct
  source 1..32: mol_type = other RNA
ggagattggtaaaccccaccttacaagaagtt

SEQ ID NO: 10556 - RNA, 41 nt, synthetic construct
  source 1..41: mol_type = other RNA
agatctgcaattcccacttcggagaggttacgggattttct

SEQ ID NO: 10557 - RNA, 31 nt, synthetic construct
  source 1..31: mol_type = other RNA
gatctacaattcccacttcggagaggttcct

SEQ ID NO: 10558 - RNA, 40 nt, synthetic construct
  source 1..40: mol_type = other RNA
ctgcaaaccccactttgatgagttccggggctttctgttg

SEQ ID NO: 10559 - RNA, 27 nt, synthetic construct
  source 1..27: mol_type = other RNA
gatctaccccactttgaagaagttcct

SEQ ID NO: 10560 - RNA, 31 nt, synthetic construct
  source 1..31: mol_type = other RNA
gatctgcaacccccactttgaagaggttcct

SEQ ID NO: 10561 - RNA, 45 nt, synthetic construct
  source 1..45: mol_type = other RNA
tggtggagttctgcaaacgccacaggaaatggagaagttcctgga

SEQ ID NO: 10562 - RNA, 41 nt, synthetic construct
  source 1..41: mol_type = other RNA
ctgcaaaccccgctttgaagatattccggtcttttctgttg

SEQ ID NO: 10563 - RNA, 30 nt, synthetic construct
  source 1..30: mol_type = other RNA
ggtggagacggcaaaccccactttgaagaa

SEQ ID NO: 10564 - RNA, 33 nt, synthetic construct
  source 1..33: mol_type = other RNA
gatctgaaaggctcatactttgataatcttcct

SEQ ID NO: 10565 - RNA, 31 nt, synthetic construct
  source 1..31: mol_type = other RNA
ggtggagttcggcaaacccgactttgaagaa

SEQ ID NO: 10566 - RNA, 41 nt, synthetic construct
  source 1..41: mol_type = other RNA
agatctgcggaccccacttcgaaggagttccgagattttct

SEQ ID NO: 10567 - RNA, 41 nt, synthetic construct
  source 1..41: mol_type = other RNA
agatctgcgaacccccctttgaaaaagatccgggattttct

SEQ ID NO: 10568 - RNA, 41 nt, synthetic construct
  source 1..41: mol_type = other RNA
tggtggagcgaggcaatgctccaatttgagaagttcctgga

SEQ ID NO: 10569 - RNA, 31 nt, synthetic construct
  source 1..31: mol_type = other RNA
caaaccccactttgaagaagtttcgggattt

SEQ ID NO: 10570 - RNA, 31 nt, synthetic construct
  source 1..31: mol_type = other RNA
ggtggagatcggcaaatcccactttgaagaa

SEQ ID NO: 10571 - RNA, 41 nt, synthetic construct
  source 1..41: mol_type = other RNA
tggtggagatcggcggaccccacttcgaaggagttcctgga

SEQ ID NO: 10572 - RNA, 31 nt, synthetic construct
  source 1..31: mol_type = other RNA
ggagatcggcaaaccccactttgaagaagtt

SEQ ID NO: 10573 - RNA, 31 nt, synthetic construct
  source 1..31: mol_type = other RNA
gatctgcaaatcccactttgacgaagttcct

SEQ ID NO: 10574 - RNA, 31 nt, synthetic construct
  source 1..31: mol_type = other RNA
ggtggaggtcggcaaatcccactttgaagaa

SEQ ID NO: 10575 - RNA, 31 nt, synthetic construct
  source 1..31: mol_type = other RNA
caaaccccactttgacgaagttccgggattt

SEQ ID NO: 10576 - RNA, 31 nt, synthetic construct
  source 1..31: mol_type = other RNA
tgcagtggtggagatcggcgaaccctacttt

SEQ ID NO: 10577 - RNA, 31 nt, synthetic construct
  source 1..31: mol_type = other RNA
gatctaagaacccgactatgaaaaagttcct

SEQ ID NO: 10578 - RNA, 41 nt, synthetic construct
  source 1..41: mol_type = other RNA
tggtggagctcgaaataccccactatgaagaagttcctgga

SEQ ID NO: 10579 - RNA, 29 nt, synthetic construct
  source 1..29: mol_type = other RNA
tgcagtggtggaggtcggcaccccacttt

SEQ ID NO: 10580 - RNA, 30 nt, synthetic construct
  source 1..30: mol_type = other RNA
gatctgcagaccccactttgatgagttcct

SEQ ID NO: 10581 - RNA, 31 nt, synthetic construct
  source 1..31: mol_type = other RNA
gatctgcgaatccctccttgaagaacttcct

SEQ ID NO: 10582 - RNA, 41 nt, synthetic construct
  source 1..41: mol_type = other RNA
agatctgcaaactccaccttgaagaagttccgagattttct

SEQ ID NO: 10583 - RNA, 31 nt, synthetic construct
  source 1..31: mol_type = other RNA
caaactccacttcgaagaagttccgggattt

SEQ ID NO: 10584 - RNA, 41 nt, synthetic construct
  source 1..41: mol_type = other RNA
ctgcaaactccactttgaagaagttccgggcttttctgttg

SEQ ID NO: 10585 - RNA, 45 nt, synthetic construct
  source 1..45: mol_type = other RNA
ctgcaaaccccacttcaacaaaagaagttccgggatattctgttg

SEQ ID NO: 10586 - RNA, 41 nt, synthetic construct
  source 1..41: mol_type = other RNA
ctgcaaaccccatattgaagaagttccgcaattttctgttg

SEQ ID NO: 10587 - RNA, 31 nt, synthetic construct
  source 1..31: mol_type = other RNA
gatctgcggactccaatttgtagaagttcct

SEQ ID NO: 10588 - RNA, 41 nt, synthetic construct
  source 1..41: mol_type = other RNA
tggtggaggtcggccaactccaactggaggaagttcctgga

SEQ ID NO: 10589 - RNA, 43 nt, synthetic construct
  source 1..43: mol_type = other RNA
ctgcaaaccccactatgaagctaatatccgagatcttctgttg

SEQ ID NO: 10590 - RNA, 52 nt, synthetic construct
  source 1..52: mol_type = other RNA
agatctgcaccccccactttctagaagttccaaatcttgccgcggattttct

SEQ ID NO: 10591 - RNA, 47 nt, synthetic construct
  source 1..47: mol_type = other RNA
tctgggctacctccccagtggtggtgattggtaggtcccactttgaa

SEQ ID NO: 10592 - RNA, 41 nt, synthetic construct
  source 1..41: mol_type = other RNA
tggtggagattggtaggtccctccttgaagaagttcctgga

SEQ ID NO: 10593 - RNA, 31 nt, synthetic construct
  source 1..31: mol_type = other RNA
ggagatcggcaaaccccgctttgaagaagtt

SEQ ID NO: 10594 - RNA, 31 nt, synthetic construct
  source 1..31: mol_type = other RNA
tgcagtagtggaattcggcagaccccacttt

SEQ ID NO: 10595 - RNA, 45 nt, synthetic construct
  source 1..45: mol_type = other RNA
ggtggagtgatctgcaaaatgagctatgaccaggggcctgaagaa

SEQ ID NO: 10596 - RNA, 44 nt, synthetic construct
  source 1..44: mol_type = other RNA
caaactgagctatgaccaggggcctgataggattgatgggattt

SEQ ID NO: 10597 - RNA, 42 nt, synthetic construct
  source 1..42: mol_type = other RNA
tctgggctgcagtggtggagttgacaatggctccactttgaa

SEQ ID NO: 10598 - RNA, 41 nt, synthetic construct
  source 1..41: mol_type = other RNA
tggtggaggtagcgcaaccccactttgtcgaagttcctgga

SEQ ID NO: 10599 - RNA, 31 nt, synthetic construct
  source 1..31: mol_type = other RNA
ggagatcggagaactccactttgagaaagtt

SEQ ID NO: 10600 - RNA, 30 nt, synthetic construct
  source 1..30: mol_type = other RNA
ggtggcgtcggcagactccaattagaagaa

SEQ ID NO: 10601 - RNA, 32 nt, synthetic construct
  source 1..32: mol_type = other RNA
ggtggagctaggcaaggctccaagccaaagaa

SEQ ID NO: 10602 - RNA, 42 nt, synthetic construct
  source 1..42: mol_type = other RNA
ctgcagtggtggagctaggcaaggctccaagccaaagaagtt

SEQ ID NO: 10603 - RNA, 30 nt, synthetic construct
  source 1..30: mol_type = other RNA
caaactccaagccaagaagtttcgggattt

SEQ ID NO: 10604 - RNA, 41 nt, synthetic construct
  source 1..41: mol_type = other RNA
tggtggagattgcaaaaccccactatgaagaagttcctgga

SEQ ID NO: 10605 - RNA, 31 nt, synthetic construct
  source 1..31: mol_type = other RNA
caaaccccactttgaagaagttctgggattt

SEQ ID NO: 10606 - RNA, 49 nt, synthetic construct
  source 1..49: mol_type = other RNA
ctgcaaaccccactttgatctcctgcagaagtcatcggattttctgttg

SEQ ID NO: 10607 - RNA, 31 nt, synthetic construct
  source 1..31: mol_type = other RNA
ggagattggcaaactcctatttgcagaagtt

SEQ ID NO: 10608 - RNA, 41 nt, synthetic construct
  source 1..41: mol_type = other RNA
ctgcagtggtggtaattggcaaactcctatttgaagaagtt

SEQ ID NO: 10609 - RNA, 38 nt, synthetic construct
  source 1..38: mol_type = other RNA
ctgcaaaccccactttgaagaagttccggtttctgttg

SEQ ID NO: 10610 - RNA, 31 nt, synthetic construct
  source 1..31: mol_type = other RNA
ggtggagattggcaaaccccacattgaagaa

SEQ ID NO: 10611 - RNA, 46 nt, synthetic construct
  source 1..46: mol_type = other RNA
tggtggagatctgcaccccccaaactttgaagtagtagttcctgga

SEQ ID NO: 10612 - RNA, 41 nt, synthetic construct
  source 1..41: mol_type = other RNA
agatctgcccaccccactttgaagaagttccgggattttct

SEQ ID NO: 10613 - RNA, 43 nt, synthetic construct
  source 1..43: mol_type = other RNA
ctgcagtggtggagatcggcagactcccggcattgaagaagtt

SEQ ID NO: 10614 - RNA, 41 nt, synthetic construct
  source 1..41: mol_type = other RNA
ctgcaaaccccactttggagaagcgccgggattttctgttg

SEQ ID NO: 10615 - RNA, 41 nt, synthetic construct
  source 1..41: mol_type = other RNA
tggtggagatcggcgggccccaacttgaaggagttcctgga

SEQ ID NO: 10616 - RNA, 41 nt, synthetic construct
  source 1..41: mol_type = other RNA
agatctgcataccccactatgaagaagttccgggattttct

SEQ ID NO: 10617 - RNA, 31 nt, synthetic construct
  source 1..31: mol_type = other RNA
tgcagtggtggatctcgaaataccccacttt

SEQ ID NO: 10618 - RNA, 31 nt, synthetic construct
  source 1..31: mol_type = other RNA
caaacccccctttgaaaaagatccgggattt

SEQ ID NO: 10619 - RNA, 41 nt, synthetic construct
  source 1..41: mol_type = other RNA
agatctgcaaaccccactttgatgaagctccgggattttct

SEQ ID NO: 10620 - RNA, 31 nt, synthetic construct
  source 1..31: mol_type = other RNA
ggagatcggcaaaccccactttgatgaagtt

SEQ ID NO: 10621 - RNA, 32 nt, synthetic construct
  source 1..32: mol_type = other RNA
ggagataggtaaaccccattttgacagaagtt

SEQ ID NO: 10622 - RNA, 42 nt, synthetic construct
  source 1..42: mol_type = other RNA
ctgcaaaccccattttgacagaagtcccgagattttctgttg

SEQ ID NO: 10623 - RNA, 31 nt, synthetic construct
  source 1..31: mol_type = other RNA
ggtggggataggtaaaccccattttgaagaa

SEQ ID NO: 10624 - RNA, 31 nt, synthetic construct
  source 1..31: mol_type = other RNA
ggagatcggcaaactccactttgaagaagtt

SEQ ID NO: 10625 - RNA, 31 nt, synthetic construct
  source 1..31: mol_type = other RNA
ggagatcggaacatcccaatttgaggaagtt

SEQ ID NO: 10626 - RNA, 31 nt, synthetic construct
  source 1..31: mol_type = other RNA
ggtggagatcgacaaaccccactttgaagaa

SEQ ID NO: 10627 - RNA, 31 nt, synthetic construct
  source 1..31: mol_type = other RNA
ggtggaggtcgcaaaactccacttcgaagaa

SEQ ID NO: 10628 - RNA, 41 nt, synthetic construct
  source 1..41: mol_type = other RNA
ctgcagtgatggccaaaggcggactccaatttgaagaagtt

SEQ ID NO: 10629 - RNA, 41 nt, synthetic construct
  source 1..41: mol_type = other RNA
agatctgcagcctccactttgaaggagttccgggattttct

SEQ ID NO: 10630 - RNA, 41 nt, synthetic construct
  source 1..41: mol_type = other RNA
tggtggagatcggcagcctccactttgaaggagttcctgga

SEQ ID NO: 10631 - RNA, 31 nt, synthetic construct
  source 1..31: mol_type = other RNA
caaacccaactttgaagacgttccgggattt

SEQ ID NO: 10632 - RNA, 31 nt, synthetic construct
  source 1..31: mol_type = other RNA
ggagagcggcggagcccacttagaagaagtt

SEQ ID NO: 10633 - RNA, 31 nt, synthetic construct
  source 1..31: mol_type = other RNA
ggagatcggcaccccccactttctagaagtt

SEQ ID NO: 10634 - RNA, 31 nt, synthetic construct
  source 1..31: mol_type = other RNA
gatctgaaaactcccctttgagaaagttcct

SEQ ID NO: 10635 - RNA, 31 nt, synthetic construct
  source 1..31: mol_type = other RNA
caaacccctctttgaagaagttccgggattt

SEQ ID NO: 10636 - RNA, 41 nt, synthetic construct
  source 1..41: mol_type = other RNA
agatctgcagaccccactttgaagaagttacgtgattttct

SEQ ID NO: 10637 - RNA, 41 nt, synthetic construct
  source 1..41: mol_type = other RNA
ctgcaaaccccactttgaaaaagttccgggctgttctgttg

SEQ ID NO: 10638 - RNA, 31 nt, synthetic construct
  source 1..31: mol_type = other RNA
caaaccccactttgaaaaagttccgggattt

SEQ ID NO: 10639 - RNA, 31 nt, synthetic construct
  source 1..31: mol_type = other RNA
gatctgcaaaccccgctttgaagatattcct

SEQ ID NO: 10640 - RNA, 54 nt, synthetic construct
  source 1..54: mol_type = other RNA
tggtggagatctgcaaaatgagctatgaccaggggcctgataggatttcctgga

SEQ ID NO: 10641 - RNA, 42 nt, synthetic construct
  source 1..42: mol_type = other RNA
ctgcaaacccctctttgaagaaggtccgctcattttctgttg

SEQ ID NO: 10642 - RNA, 31 nt, synthetic construct
  source 1..31: mol_type = other RNA
ggtggacgatggaaggccccactttaaagaa

SEQ ID NO: 10643 - RNA, 43 nt, synthetic construct
  source 1..43: mol_type = other RNA
ctgcagtgggggggatcggaaaggctcatactttgaagaagtt

SEQ ID NO: 10644 - RNA, 31 nt, synthetic construct
  source 1..31: mol_type = other RNA
caaacccccctatgaagaagttccgggattt

SEQ ID NO: 10645 - RNA, 42 nt, synthetic construct
  source 1..42: mol_type = other RNA
ctgcagtggtggagctgacaacagcgccgatttgaagaagtt

SEQ ID NO: 10646 - RNA, 41 nt, synthetic construct
  source 1..41: mol_type = other RNA
tggtggaggtcggcaaaccccactttgaagaagttcctgga

SEQ ID NO: 10647 - RNA, 55 nt, synthetic construct
  source 1..55: mol_type = other RNA
tggtggagaactgaaaacccgtctttgaagtaaaaaaattctacaagttcctgga

SEQ ID NO: 10648 - RNA, 30 nt, synthetic construct
  source 1..30: mol_type = other RNA
ggagatcggcacgccccactgcaagaagtt

SEQ ID NO: 10649 - RNA, 40 nt, synthetic construct
  source 1..40: mol_type = other RNA
ctgcaaaccccactgcaaggactttcggggtcttctgttg

SEQ ID NO: 10650 - RNA, 31 nt, synthetic construct
  source 1..31: mol_type = other RNA
ggtggaacttggcaattcccactttgaagaa

SEQ ID NO: 10651 - RNA, 31 nt, synthetic construct
  source 1..31: mol_type = other RNA
caaaccccacttcgaaggagttccgagattt

SEQ ID NO: 10652 - RNA, 31 nt, synthetic construct
  source 1..31: mol_type = other RNA
ggtggcaatcggcaaaccccactttgaagaa

SEQ ID NO: 10653 - RNA, 41 nt, synthetic construct
  source 1..41: mol_type = other RNA
ctgcaaaccccactttcaagctattctggacttttctgttg

SEQ ID NO: 10654 - RNA, 31 nt, synthetic construct
  source 1..31: mol_type = other RNA
gatctgtaaaccccactttcaagctattcct

SEQ ID NO: 10655 - RNA, 36 nt, synthetic construct
  source 1..36: mol_type = other RNA
gatctgcaccccccaaactttgaagtagtagttcct

SEQ ID NO: 10656 - RNA, 31 nt, synthetic construct
  source 1..31: mol_type = other RNA
gatctgccgaccccactttgaagaagttcct

SEQ ID NO: 10657 - RNA, 41 nt, synthetic construct
  source 1..41: mol_type = other RNA
ctgcaaaccccactttgacgaagttccggggttttctgttg

SEQ ID NO: 10658 - RNA, 42 nt, synthetic construct
  source 1..42: mol_type = other RNA
ctgcaaacccgactatgaaaaagttccgggatctttctgttg

SEQ ID NO: 10659 - RNA, 31 nt, synthetic construct
  source 1..31: mol_type = other RNA
gatctgcgggccccaacttgaaggagttcct

SEQ ID NO: 10660 - RNA, 31 nt, synthetic construct
  source 1..31: mol_type = other RNA
caaacccccctttgacgaagttccgggattt

SEQ ID NO: 10661 - RNA, 41 nt, synthetic construct
  source 1..41: mol_type = other RNA
ctgcaaaccccactgtgaagaagttccgggattttctgttg

SEQ ID NO: 10662 - RNA, 31 nt, synthetic construct
  source 1..31: mol_type = other RNA
caaactcgactttgaggaagttccgggattt

SEQ ID NO: 10663 - RNA, 41 nt, synthetic construct
  source 1..41: mol_type = other RNA
ctgcaaaccccactttgaagaagttccgagattttctgttg

SEQ ID NO: 10664 - RNA, 29 nt, synthetic construct
  source 1..29: mol_type = other RNA
tgcagtggtggatcggcagaccccacttt

SEQ ID NO: 10665 - RNA, 32 nt, synthetic construct
  source 1..32: mol_type = other RNA
tgcagtggtggagacgagcaatgctccacttt

SEQ ID NO: 10666 - RNA, 31 nt, synthetic construct
  source 1..31: mol_type = other RNA
ggagatcgacaaaccccactttgtcgaagtt

SEQ ID NO: 10667 - RNA, 32 nt, synthetic construct
  source 1..32: mol_type = other RNA
gatctgcaaaactccacttcgacgaatttcct

SEQ ID NO: 10668 - RNA, 27 nt, synthetic construct
  source 1..27: mol_type = other RNA
ggagatcgaccccactttgaagaagtt

SEQ ID NO: 10669 - RNA, 38 nt, synthetic construct
  source 1..38: mol_type = other RNA
tggtggagcgtcgaccccactttgaagaagttcctgga

SEQ ID NO: 10670 - RNA, 41 nt, synthetic construct
  source 1..41: mol_type = other RNA
agatctgcaaaccccactttgaacaagttccgggattttct

SEQ ID NO: 10671 - RNA, 41 nt, synthetic construct
  source 1..41: mol_type = other RNA
agatctgcaacccccactttgaagaggtttagggattttct

SEQ ID NO: 10672 - RNA, 40 nt, synthetic construct
  source 1..40: mol_type = other RNA
agatctgcagactccactttgagaaatagcgcgattttct

SEQ ID NO: 10673 - RNA, 44 nt, synthetic construct
  source 1..44: mol_type = other RNA
ctgcagtggtggagatcggcaaactaaaaaccaatgaagaagtt

SEQ ID NO: 10674 - RNA, 41 nt, synthetic construct
  source 1..41: mol_type = other RNA
tggtggaggtcgacacctccaactttgaagacgttcctgga

SEQ ID NO: 10675 - RNA, 31 nt, synthetic construct
  source 1..31: mol_type = other RNA
ggagagaggaagaccccactttgaagaagtt

SEQ ID NO: 10676 - RNA, 41 nt, synthetic construct
  source 1..41: mol_type = other RNA
ctgcaaaccccactttgaagaagttacgtgattttctgttg

SEQ ID NO: 10677 - RNA, 31 nt, synthetic construct
  source 1..31: mol_type = other RNA
gatctgtaggtccctccttgaagaagttcct

SEQ ID NO: 10678 - RNA, 42 nt, synthetic construct
  source 1..42: mol_type = other RNA
ctgcagtggtggagctgggcaaggctccaatttgaagaagtt

SEQ ID NO: 10679 - RNA, 31 nt, synthetic construct
  source 1..31: mol_type = other RNA
ggagatgacaatggctccaatttgagaagtt

SEQ ID NO: 10680 - RNA, 41 nt, synthetic construct
  source 1..41: mol_type = other RNA
ctgcagtggtggggataggcaaactctgttttgaagaagtt

SEQ ID NO: 10681 - RNA, 31 nt, synthetic construct
  source 1..31: mol_type = other RNA
ggtggagttcggcacacccgactttgaagaa

SEQ ID NO: 10682 - RNA, 42 nt, synthetic construct
  source 1..42: mol_type = other RNA
agatctgcaaaccccactttgaccgaagtcccgggattttct

SEQ ID NO: 10683 - RNA, 31 nt, synthetic construct
  source 1..31: mol_type = other RNA
tgcagtgatggacgtcggagaactccacttt

SEQ ID NO: 10684 - RNA, 41 nt, synthetic construct
  source 1..41: mol_type = other RNA
agatctgcaaactccactctgagaaagttccgggattttct

SEQ ID NO: 10685 - RNA, 31 nt, synthetic construct
  source 1..31: mol_type = other RNA
gatctcaaaaccccactatgaagaagttcct

SEQ ID NO: 10686 - RNA, 31 nt, synthetic construct
  source 1..31: mol_type = other RNA
tgcagtagtggagttcgtcaaaaccgacttt

SEQ ID NO: 10687 - RNA, 45 nt, synthetic construct
  source 1..45: mol_type = other RNA
gatctgagagccccacacacacacacacttagaatttgagttcct

SEQ ID NO: 10688 - RNA, 45 nt, synthetic construct
  source 1..45: mol_type = other RNA
gatctgaaaacccgtctttgaagtaaaaaaattctacaagttcct

SEQ ID NO: 10689 - RNA, 30 nt, synthetic construct
  source 1..30: mol_type = other RNA
ggtggaactcggcacgccccactgcaagaa

SEQ ID NO: 10690 - RNA, 61 nt, synthetic construct
  source 1..61: mol_type = other RNA
caaacccgcactccagcttggttgaaagagggagagaagttctcaaaaaaaaacgggattt

SEQ ID NO: 10691 - RNA, 42 nt, synthetic construct
  source 1..42: mol_type = other RNA
caaaccccactttaaggaagttgaaaaaaattatcgagattt

SEQ ID NO: 10692 - RNA, 31 nt, synthetic construct
  source 1..31: mol_type = other RNA
ggagatcggcggaccccacttcgaagaagtt

SEQ ID NO: 10693 - RNA, 31 nt, synthetic construct
  source 1..31: mol_type = other RNA
gatctgcggaccccacttcgaaggagttcct

SEQ ID NO: 10694 - RNA, 33 nt, synthetic construct
  source 1..33: mol_type = other RNA
ggtggagatcggcaccccccaaactttgaagaa

SEQ ID NO: 10695 - RNA, 31 nt, synthetic construct
  source 1..31: mol_type = other RNA
ggagatcggcgaacccgaatttgaagaagtt

SEQ ID NO: 10696 - RNA, 31 nt, synthetic construct
  source 1..31: mol_type = other RNA
ggagattggctgctcccactttggagaagtt

SEQ ID NO: 10697 - RNA, 41 nt, synthetic construct
  source 1..41: mol_type = other RNA
agatctgcgaaccccactatgaagaagttccgggattttct

SEQ ID NO: 10698 - RNA, 41 nt, synthetic construct
  source 1..41: mol_type = other RNA
tggtggagattggcacttcccactttgaagaagttcctgga

SEQ ID NO: 10699 - RNA, 29 nt, synthetic construct
  source 1..29: mol_type = other RNA
ggagatcggcaccccactttgaagaagtt

SEQ ID NO: 10700 - RNA, 41 nt, synthetic construct
  source 1..41: mol_type = other RNA
agatctgcaggacccactgtgaagaagttccgggattttct

SEQ ID NO: 10701 - RNA, 31 nt, synthetic construct
  source 1..31: mol_type = other RNA
ggtggaactcggcaaaccccactttgaagaa

SEQ ID NO: 10702 - RNA, 31 nt, synthetic construct
  source 1..31: mol_type = other RNA
gatctgcaaactccactttgaaggagttcct

SEQ ID NO: 10703 - RNA, 41 nt, synthetic construct
  source 1..41: mol_type = other RNA
tggtggagatcggcaaactccactttgaaggagttcctgga

SEQ ID NO: 10704 - RNA, 31 nt, synthetic construct
  source 1..31: mol_type = other RNA
ggtggagatcggcagaccccactttgaagaa

SEQ ID NO: 10705 - RNA, 31 nt, synthetic construct
  source 1..31: mol_type = other RNA
caaaccccactttgaagaagatccgggattt

SEQ ID NO: 10706 - RNA, 41 nt, synthetic construct
  source 1..41: mol_type = other RNA
ctgcaaaccccactttgaagaagctccgggattttctgttg

SEQ ID NO: 10707 - RNA, 41 nt, synthetic construct
  source 1..41: mol_type = other RNA
tggtggaggtcgcaaaactccacttcgacgaatttcctgga

SEQ ID NO: 10708 - RNA, 31 nt, synthetic construct
  source 1..31: mol_type = other RNA
ggtggagaccggcaaaccccactttgaagaa

SEQ ID NO: 10709 - RNA, 31 nt, synthetic construct
  source 1..31: mol_type = other RNA
caaaccccactttgaacaagttccgggattt

SEQ ID NO: 10710 - RNA, 45 nt, synthetic construct
  source 1..45: mol_type = other RNA
agatctgcaagccccacttcaacaaaagaagttccgggattttct

SEQ ID NO: 10711 - RNA, 35 nt, synthetic construct
  source 1..35: mol_type = other RNA
gatctcaaagccccacttcaacaaaagaagttcct

SEQ ID NO: 10712 - RNA, 31 nt, synthetic construct
  source 1..31: mol_type = other RNA
ggagatcggtaaaccccactttgaagaagtt

SEQ ID NO: 10713 - RNA, 31 nt, synthetic construct
  source 1..31: mol_type = other RNA
ggtggagatcggtaaaccccactttgaagaa

SEQ ID NO: 10714 - RNA, 31 nt, synthetic construct
  source 1..31: mol_type = other RNA
ggagatcggcacaccccactttgaaaaagtt

SEQ ID NO: 10715 - RNA, 31 nt, synthetic construct
  source 1..31: mol_type = other RNA
ggtggaggtcggcacaccccactttgaagaa

SEQ ID NO: 10716 - RNA, 32 nt, synthetic construct
  source 1..32: mol_type = other RNA
ggtggagcgaggcaatgctccaatttgaagaa

SEQ ID NO: 10717 - RNA, 41 nt, synthetic construct
  source 1..41: mol_type = other RNA
agatctgcaaactctacttcgaggaagttccgggattttct

SEQ ID NO: 10718 - RNA, 41 nt, synthetic construct
  source 1..41: mol_type = other RNA
agatctgcaaaccccaccttgaagaagttccgggattttct

SEQ ID NO: 10719 - RNA, 31 nt, synthetic construct
  source 1..31: mol_type = other RNA
ggtggatatcggaaaactcccctttgaagaa

SEQ ID NO: 10720 - RNA, 31 nt, synthetic construct
  source 1..31: mol_type = other RNA
tgcagtgatggatatcggaaaactccacttt

SEQ ID NO: 10721 - RNA, 41 nt, synthetic construct
  source 1..41: mol_type = other RNA
tggtggagagaggaagaccccactttgaagaagttcctgga

SEQ ID NO: 10722 - RNA, 41 nt, synthetic construct
  source 1..41: mol_type = other RNA
ctgcaaaccccgctttgcaaaagttccgggattttctgttg

SEQ ID NO: 10723 - RNA, 31 nt, synthetic construct
  source 1..31: mol_type = other RNA
caaaccccgctttgcaaaagttccgggattt

SEQ ID NO: 10724 - RNA, 41 nt, synthetic construct
  source 1..41: mol_type = other RNA
agatctgcaacccccactttgaaaaagttccgggattttct

SEQ ID NO: 10725 - RNA, 31 nt, synthetic construct
  source 1..31: mol_type = other RNA
tgcagtgatggcaatcggcaacccccacttt

SEQ ID NO: 10726 - RNA, 30 nt, synthetic construct
  source 1..30: mol_type = other RNA
ggagacggcaaaccccactttgaagaagtt

SEQ ID NO: 10727 - RNA, 31 nt, synthetic construct
  source 1..31: mol_type = other RNA
ggagatgggcaaggctccaatttgagaagtt

SEQ ID NO: 10728 - RNA, 30 nt, synthetic construct
  source 1..30: mol_type = other RNA
caaactccaatttgagaagttccgggattt

SEQ ID NO: 10729 - RNA, 32 nt, synthetic construct
  source 1..32: mol_type = other RNA
ggagataggcaaactctgttttgacagaagtt

SEQ ID NO: 10730 - RNA, 31 nt, synthetic construct
  source 1..31: mol_type = other RNA
ggtggaggtagcgcaaccccactttgaagaa

SEQ ID NO: 10731 - RNA, 32 nt, synthetic construct
  source 1..32: mol_type = other RNA
caaactcatactttgataatcattcgggattt

SEQ ID NO: 10732 - RNA, 31 nt, synthetic construct
  source 1..31: mol_type = other RNA
gatctgagaactccactttgagacagttcct

SEQ ID NO: 10733 - RNA, 41 nt, synthetic construct
  source 1..41: mol_type = other RNA
agatctgcccactccacttagaggaagttccgggattttct

SEQ ID NO: 10734 - RNA, 41 nt, synthetic construct
  source 1..41: mol_type = other RNA
tggtggagcgaggcaaggctccaggcaaagaagttcctgga

SEQ ID NO: 10735 - RNA, 31 nt, synthetic construct
  source 1..31: mol_type = other RNA
tgcagtgatggacgtcggaaaactccacttt

SEQ ID NO: 10736 - RNA, 32 nt, synthetic construct
  source 1..32: mol_type = other RNA
gatctacaacagcgccgatttgagaagttcct

SEQ ID NO: 10737 - RNA, 32 nt, synthetic construct
  source 1..32: mol_type = other RNA
ggtggagctgacaacagcgccgatttgaagaa

SEQ ID NO: 10738 - RNA, 40 nt, synthetic construct
  source 1..40: mol_type = other RNA
ctgcagtggtggagttcgtcaaaaccgacttaaagaagtt

SEQ ID NO: 10739 - RNA, 49 nt, synthetic construct
  source 1..49: mol_type = other RNA
tggtggaggtctacccgccccactttgatctcctgcagaagttcctgga

SEQ ID NO: 10740 - RNA, 41 nt, synthetic construct
  source 1..41: mol_type = other RNA
tggtggagattggcaaactcctatttgcaggagttcctgga

SEQ ID NO: 10741 - RNA, 38 nt, synthetic construct
  source 1..38: mol_type = other RNA
caaacccctactttgataaaattgaagttccgggattt

SEQ ID NO: 10742 - RNA, 39 nt, synthetic construct
  source 1..39: mol_type = other RNA
ctgcaaactccacttagaggaagccgggattttctgttg

SEQ ID NO: 10743 - RNA, 48 nt, synthetic construct
  source 1..48: mol_type = other RNA
tctgggctgcagcgtggtggcatcgatggtctaaacccgcactttgaa

SEQ ID NO: 10744 - RNA, 30 nt, synthetic construct
  source 1..30: mol_type = other RNA
caaacccccttggaggatgatccgggattt

SEQ ID NO: 10745 - RNA, 31 nt, synthetic construct
  source 1..31: mol_type = other RNA
gatctgcaattcccactttgaagaagttcct

SEQ ID NO: 10746 - RNA, 41 nt, synthetic construct
  source 1..41: mol_type = other RNA
tggtggagcttggcaattcccactttgaagaagttcctgga

SEQ ID NO: 10747 - RNA, 32 nt, synthetic construct
  source 1..32: mol_type = other RNA
ggagatcggcaaaccccaactttgacgaagtt

SEQ ID NO: 10748 - RNA, 31 nt, synthetic construct
  source 1..31: mol_type = other RNA
ggtggagatcggcggaccccacttcgaagaa

SEQ ID NO: 10749 - RNA, 31 nt, synthetic construct
  source 1..31: mol_type = other RNA
ggtggagatcggtaaaccccactttcaagaa

SEQ ID NO: 10750 - RNA, 31 nt, synthetic construct
  source 1..31: mol_type = other RNA
caaaccccacattgaagaagttctgggattt

SEQ ID NO: 10751 - RNA, 41 nt, synthetic construct
  source 1..41: mol_type = other RNA
agatctgctgctcccactttggagaagcgccgggattttct

SEQ ID NO: 10752 - RNA, 31 nt, synthetic construct
  source 1..31: mol_type = other RNA
ggtggagattggctgctcccactttgaagaa

SEQ ID NO: 10753 - RNA, 31 nt, synthetic construct
  source 1..31: mol_type = other RNA
ggtggagatcggcaaacccccctttgaagaa

SEQ ID NO: 10754 - RNA, 41 nt, synthetic construct
  source 1..41: mol_type = other RNA
tggtggagatcggcaaacccccctttgaacaagttcctgga

SEQ ID NO: 10755 - RNA, 31 nt, synthetic construct
  source 1..31: mol_type = other RNA
tgcagcggtggagattggcacttcccacttt

SEQ ID NO: 10756 - RNA, 32 nt, synthetic construct
  source 1..32: mol_type = other RNA
gatctgtaaaccccaccttacaagaagttcct

SEQ ID NO: 10757 - RNA, 41 nt, synthetic construct
  source 1..41: mol_type = other RNA
tggtggagatcggcgaaccctacggtgaagaagttcctgga

SEQ ID NO: 10758 - RNA, 31 nt, synthetic construct
  source 1..31: mol_type = other RNA
ggtggagatcgaagaacccgactatgaagaa

SEQ ID NO: 10759 - RNA, 41 nt, synthetic construct
  source 1..41: mol_type = other RNA
ctgcaaaccccactatgaagaagttccggggttttctgttg

SEQ ID NO: 10760 - RNA, 41 nt, synthetic construct
  source 1..41: mol_type = other RNA
tggtggagatcgaagaacccccctttgaaaaagttcctgga

SEQ ID NO: 10761 - RNA, 31 nt, synthetic construct
  source 1..31: mol_type = other RNA
ggtggggatcggcgggccccaatccgaagaa

SEQ ID NO: 10762 - RNA, 31 nt, synthetic construct
  source 1..31: mol_type = other RNA
caaacccctccttgaagaacttccgggattt

SEQ ID NO: 10763 - RNA, 31 nt, synthetic construct
  source 1..31: mol_type = other RNA
ggagatcggcaaggtccaatttgaaaaagtt

SEQ ID NO: 10764 - RNA, 31 nt, synthetic construct
  source 1..31: mol_type = other RNA
caaactccaatttgaaattagaccgagattt

SEQ ID NO: 10765 - RNA, 41 nt, synthetic construct
  source 1..41: mol_type = other RNA
tggtggaggtcggaacatcccaatttgaggaagttcctgga

SEQ ID NO: 10766 - RNA, 41 nt, synthetic construct
  source 1..41: mol_type = other RNA
ctgcaaaccccacgtggaagaagttccgagatcttctgttg

SEQ ID NO: 10767 - RNA, 31 nt, synthetic construct
  source 1..31: mol_type = other RNA
tgcagaggtggcaatcggcaacccccacttt

SEQ ID NO: 10768 - RNA, 31 nt, synthetic construct
  source 1..31: mol_type = other RNA
ggagaaaggcggactccaatttgtagaagtt

SEQ ID NO: 10769 - RNA, 31 nt, synthetic construct
  source 1..31: mol_type = other RNA
ggtggccaaaggcggactccaatttgaagaa

SEQ ID NO: 10770 - RNA, 28 nt, synthetic construct
  source 1..28: mol_type = other RNA
gatctgcacaccccactttgaaattcct

SEQ ID NO: 10771 - RNA, 31 nt, synthetic construct
  source 1..31: mol_type = other RNA
ggagagaggcaatgctccaatttgagaagtt

SEQ ID NO: 10772 - RNA, 31 nt, synthetic construct
  source 1..31: mol_type = other RNA
tgcagtggtggacgtcggcagactccacttt

SEQ ID NO: 10773 - RNA, 31 nt, synthetic construct
  source 1..31: mol_type = other RNA
ggagatcggccaactccaactggaggaagtt

SEQ ID NO: 10774 - RNA, 41 nt, synthetic construct
  source 1..41: mol_type = other RNA
ctgcaaactccaactggaggaagttccgagatcttctgttg

SEQ ID NO: 10775 - RNA, 31 nt, synthetic construct
  source 1..31: mol_type = other RNA
ggagatcggcaaaccccactatgaagaagtt

SEQ ID NO: 10776 - RNA, 33 nt, synthetic construct
  source 1..33: mol_type = other RNA
caaaccccagactttaaagaagttccgggattt

SEQ ID NO: 10777 - RNA, 49 nt, synthetic construct
  source 1..49: mol_type = other RNA
ctgcaaactccactttgagggctggtctcaccgtcccaattttctgttg

SEQ ID NO: 10778 - RNA, 41 nt, synthetic construct
  source 1..41: mol_type = other RNA
tctgggctccagtgatggctgtcgactagatccactttgaa

SEQ ID NO: 10779 - RNA, 31 nt, synthetic construct
  source 1..31: mol_type = other RNA
gatctgcaccccccactttctagaagttcct

SEQ ID NO: 10780 - RNA, 41 nt, synthetic construct
  source 1..41: mol_type = other RNA
agatctgcaaactcccctttgagaaagttgcgggattttct

SEQ ID NO: 10781 - RNA, 31 nt, synthetic construct
  source 1..31: mol_type = other RNA
ggagatcggcagaccccacttttttgaagtt

SEQ ID NO: 10782 - RNA, 41 nt, synthetic construct
  source 1..41: mol_type = other RNA
ctgcaaaccccacttttttgaagttccgggtttttctgttg

SEQ ID NO: 10783 - RNA, 40 nt, synthetic construct
  source 1..40: mol_type = other RNA
tggtggagacggcaaaccccactttgaagaagttcctgga

SEQ ID NO: 10784 - RNA, 44 nt, synthetic construct
  source 1..44: mol_type = other RNA
gatctgcaaaatgagctatgaccaggggcctgataggatttcct

SEQ ID NO: 10785 - RNA, 40 nt, synthetic construct
  source 1..40: mol_type = other RNA
ctgcaaactccaatttgagaagttccgggattttctgttg

SEQ ID NO: 10786 - RNA, 31 nt, synthetic construct
  source 1..31: mol_type = other RNA
gatctgcaggcccctccttgaggaagttcct

SEQ ID NO: 10787 - RNA, 31 nt, synthetic construct
  source 1..31: mol_type = other RNA
ggtggtgattggcaggcccctccttgaagaa

SEQ ID NO: 10788 - RNA, 31 nt, synthetic construct
  source 1..31: mol_type = other RNA
caaacccctccttgaggaagtttcgggattt

SEQ ID NO: 10789 - RNA, 42 nt, synthetic construct
  source 1..42: mol_type = other RNA
agatctgcaatggctccaatttgagaagtttcgggattttct

SEQ ID NO: 10790 - RNA, 40 nt, synthetic construct
  source 1..40: mol_type = other RNA
ctgcaaactccaatttgagaagtttcgggattttctgttg

SEQ ID NO: 10791 - RNA, 41 nt, synthetic construct
  source 1..41: mol_type = other RNA
agatctgcaagccccactttgaagaagttccgggattttct

SEQ ID NO: 10792 - RNA, 31 nt, synthetic construct
  source 1..31: mol_type = other RNA
gatctgcaagccccactttgaagaagttcct

SEQ ID NO: 10793 - RNA, 42 nt, synthetic construct
  source 1..42: mol_type = other RNA
tctgggctgcggtgggggggatcggaaaggctcaactttgaa

SEQ ID NO: 10794 - RNA, 31 nt, synthetic construct
  source 1..31: mol_type = other RNA
ggtgggggtaggcaaaccccactttgaagaa

SEQ ID NO: 10795 - RNA, 41 nt, synthetic construct
  source 1..41: mol_type = other RNA
tggtggagctcggcacacccccctatgaagaagttcctgga

SEQ ID NO: 10796 - RNA, 40 nt, synthetic construct
  source 1..40: mol_type = other RNA
ctgcagtggtgccgtcggcagactccaattagaagaagtt

SEQ ID NO: 10797 - RNA, 31 nt, synthetic construct
  source 1..31: mol_type = other RNA
gatctgcaaggctccaggcaaagaagttcct

SEQ ID NO: 10798 - RNA, 29 nt, synthetic construct
  source 1..29: mol_type = other RNA
ggagatcgtcaaaaccgacttaagaagtt

SEQ ID NO: 10799 - RNA, 39 nt, synthetic construct
  source 1..39: mol_type = other RNA
tggtggagttcgtcaaaaccgacttaagaagttcctgga

SEQ ID NO: 10800 - RNA, 31 nt, synthetic construct
  source 1..31: mol_type = other RNA
ggtggaggtcggcaaaccccactttgaagaa

SEQ ID NO: 10801 - RNA, 31 nt, synthetic construct
  source 1..31: mol_type = other RNA
ggtggctgtcgacccgccccactttgaagaa

SEQ ID NO: 10802 - RNA, 31 nt, synthetic construct
  source 1..31: mol_type = other RNA
tgcagtgatgaatgtaggcatgctccacttt

SEQ ID NO: 10803 - RNA, 40 nt, synthetic construct
  source 1..40: mol_type = other RNA
tggtggagctcggcacgccccactgcaaggacttcctgga

SEQ ID NO: 10804 - RNA, 52 nt, synthetic construct
  source 1..52: mol_type = other RNA
gatctgtctaaacccgcactccagcttggttgaaagagggagagaagttcct

SEQ ID NO: 10805 - RNA, 41 nt, synthetic construct
  source 1..41: mol_type = other RNA
agatctgcaaaccccactttgaagaagttccgggattttct

SEQ ID NO: 10806 - RNA, 42 nt, synthetic construct
  source 1..42: mol_type = other RNA
agatctgcaggctcatactttgataatcattcgggattttct

SEQ ID NO: 10807 - RNA, 31 nt, synthetic construct
  source 1..31: mol_type = other RNA
ggagattggcaattcccactttgaagaagtt

SEQ ID NO: 10808 - RNA, 41 nt, synthetic construct
  source 1..41: mol_type = other RNA
ctgcaaaccccactttgaagaagtttcgggcttttctgttg

SEQ ID NO: 10809 - RNA, 41 nt, synthetic construct
  source 1..41: mol_type = other RNA
ctgcaaaccccactttgaagaagttccgggattttctgttg

SEQ ID NO: 10810 - RNA, 31 nt, synthetic construct
  source 1..31: mol_type = other RNA
ggagatcggcgaaccccagcttgaagaagtt

SEQ ID NO: 10811 - RNA, 41 nt, synthetic construct
  source 1..41: mol_type = other RNA
ctgcaaaccccagcttgaagaagttccgggattttctgttg

SEQ ID NO: 10812 - RNA, 31 nt, synthetic construct
  source 1..31: mol_type = other RNA
ggagatcggccgaccccactttgaagaagtt

SEQ ID NO: 10813 - RNA, 31 nt, synthetic construct
  source 1..31: mol_type = other RNA
ggtggagatcggcgaacccgaatttgaagaa

SEQ ID NO: 10814 - RNA, 41 nt, synthetic construct
  source 1..41: mol_type = other RNA
tggtggagatcggcgaacccgaatttgaaggagttcctgga

SEQ ID NO: 10815 - RNA, 33 nt, synthetic construct
  source 1..33: mol_type = other RNA
ggtggagatcggcagactcccggcattgaagaa

SEQ ID NO: 10816 - RNA, 43 nt, synthetic construct
  source 1..43: mol_type = other RNA
tggtggagatcggcagactcccggcattgaagggtttcctgga

SEQ ID NO: 10817 - RNA, 31 nt, synthetic construct
  source 1..31: mol_type = other RNA
ggagatcggcaaatcccactttgacgaagtt

SEQ ID NO: 10818 - RNA, 31 nt, synthetic construct
  source 1..31: mol_type = other RNA
ggtggagatcgacgaaccccactatgaagaa

SEQ ID NO: 10819 - RNA, 31 nt, synthetic construct
  source 1..31: mol_type = other RNA
ggagattggcacttcccactttgaagaagtt

SEQ ID NO: 10820 - RNA, 31 nt, synthetic construct
  source 1..31: mol_type = other RNA
ggagatcgaagaacccgactatgaaaaagtt

SEQ ID NO: 10821 - RNA, 31 nt, synthetic construct
  source 1..31: mol_type = other RNA
tgcagtggtcgagatcggcgggccccacttt

SEQ ID NO: 10822 - RNA, 31 nt, synthetic construct
  source 1..31: mol_type = other RNA
tgcagtggttcagatcgacaattcccacttt

SEQ ID NO: 10823 - RNA, 31 nt, synthetic construct
  source 1..31: mol_type = other RNA
caaaccccacttcggagaggttacgggattt

SEQ ID NO: 10824 - RNA, 31 nt, synthetic construct
  source 1..31: mol_type = other RNA
caaaccccactatgaagaagttccgggattt

SEQ ID NO: 10825 - RNA, 29 nt, synthetic construct
  source 1..29: mol_type = other RNA
ggtggaggtcggcaccccactttgaagaa

SEQ ID NO: 10826 - RNA, 42 nt, synthetic construct
  source 1..42: mol_type = other RNA
agatctgcacacccccctttgatagaagttctgggattttct

SEQ ID NO: 10827 - RNA, 32 nt, synthetic construct
  source 1..32: mol_type = other RNA
ggagatcggaacacccccctttgatagaagtt

SEQ ID NO: 10828 - RNA, 41 nt, synthetic construct
  source 1..41: mol_type = other RNA
ctgcaaacccccctttgatagaagttctggggattctgttg

SEQ ID NO: 10829 - RNA, 42 nt, synthetic construct
  source 1..42: mol_type = other RNA
tggtggagatcggaacacccccctttgatagaagttcctgga

SEQ ID NO: 10830 - RNA, 31 nt, synthetic construct
  source 1..31: mol_type = other RNA
ggagatcggccaacccccctttgacgaagtt

SEQ ID NO: 10831 - RNA, 41 nt, synthetic construct
  source 1..41: mol_type = other RNA
tggtggagatcggcaggacccactgtgaagaagttcctgga

SEQ ID NO: 10832 - RNA, 31 nt, synthetic construct
  source 1..31: mol_type = other RNA
ggtggagctcggcagaccccactttgaagaa

SEQ ID NO: 10833 - RNA, 31 nt, synthetic construct
  source 1..31: mol_type = other RNA
tgcagtagtcgggatcggcgggccccacttt

SEQ ID NO: 10834 - RNA, 41 nt, synthetic construct
  source 1..41: mol_type = other RNA
ctgcaaacccctccttgaagaacttccgggattttctgttg

SEQ ID NO: 10835 - RNA, 31 nt, synthetic construct
  source 1..31: mol_type = other RNA
ggtggagatcggcgaatccctccttgaagaa

SEQ ID NO: 10836 - RNA, 31 nt, synthetic construct
  source 1..31: mol_type = other RNA
ggtgggcatcggcaaactccaccttgaagaa

SEQ ID NO: 10837 - RNA, 31 nt, synthetic construct
  source 1..31: mol_type = other RNA
caaactccaccttgaagaagttccgagattt

SEQ ID NO: 10838 - RNA, 31 nt, synthetic construct
  source 1..31: mol_type = other RNA
ggagatcggcagaccccactttgaagaagtt

SEQ ID NO: 10839 - RNA, 30 nt, synthetic construct
  source 1..30: mol_type = other RNA
ggtgggatcggcagaccccactttgaagaa

SEQ ID NO: 10840 - RNA, 41 nt, synthetic construct
  source 1..41: mol_type = other RNA
agatctgcaaaccccactttgaagaagctccgggattttct

SEQ ID NO: 10841 - RNA, 31 nt, synthetic construct
  source 1..31: mol_type = other RNA
tgcagtgttggaggtcggcaaaccccacttt

SEQ ID NO: 10842 - RNA, 31 nt, synthetic construct
  source 1..31: mol_type = other RNA
ggagatcggcccaccccacgtggaagaagtt

SEQ ID NO: 10843 - RNA, 31 nt, synthetic construct
  source 1..31: mol_type = other RNA
ggagatcgcaaaactccacttcgacgaagtt

SEQ ID NO: 10844 - RNA, 41 nt, synthetic construct
  source 1..41: mol_type = other RNA
ctgcaaaccccactttgaagaggtttagggatgttctgttg

SEQ ID NO: 10845 - RNA, 31 nt, synthetic construct
  source 1..31: mol_type = other RNA
gatctgcaatgctccaatttgagaagttcct

SEQ ID NO: 10846 - RNA, 40 nt, synthetic construct
  source 1..40: mol_type = other RNA
tggtggaggtcggcagactccactttgagaaattcctgga

SEQ ID NO: 10847 - RNA, 31 nt, synthetic construct
  source 1..31: mol_type = other RNA
gatctgccaactccaactggaggaagttcct

SEQ ID NO: 10848 - RNA, 31 nt, synthetic construct
  source 1..31: mol_type = other RNA
ggtggaggtcggccaactccaactggaagaa

SEQ ID NO: 10849 - RNA, 34 nt, synthetic construct
  source 1..34: mol_type = other RNA
ggtggagatcggcaaactaaaaaccaatgaagaa

SEQ ID NO: 10850 - RNA, 31 nt, synthetic construct
  source 1..31: mol_type = other RNA
ggtggacgtcgacacctccaactttgaagaa

SEQ ID NO: 10851 - RNA, 33 nt, synthetic construct
  source 1..33: mol_type = other RNA
ggagaacggcaaaccccagactttaaagaagtt

SEQ ID NO: 10852 - RNA, 33 nt, synthetic construct
  source 1..33: mol_type = other RNA
ggtggagaacggcaaaccccagactttaaagaa

SEQ ID NO: 10853 - RNA, 31 nt, synthetic construct
  source 1..31: mol_type = other RNA
ggtggaacgcggcggagcccacttagaagaa

SEQ ID NO: 10854 - RNA, 41 nt, synthetic construct
  source 1..41: mol_type = other RNA
tggtggagcgcggcggagcccacttagaaggagttcctgga

SEQ ID NO: 10855 - RNA, 31 nt, synthetic construct
  source 1..31: mol_type = other RNA
caaaccccacttagaaggagtcctgggattt

SEQ ID NO: 10856 - RNA, 35 nt, synthetic construct
  source 1..35: mol_type = other RNA
ggagatctgcaaacgccacaggaaatggagaagtt

SEQ ID NO: 10857 - RNA, 35 nt, synthetic construct
  source 1..35: mol_type = other RNA
ggtggagttcggcaaacgccacaggaaatgaagaa

SEQ ID NO: 10858 - RNA, 31 nt, synthetic construct
  source 1..31: mol_type = other RNA
caaaccccactttgaagaagttacgtgattt

SEQ ID NO: 10859 - RNA, 31 nt, synthetic construct
  source 1..31: mol_type = other RNA
ggagatcggcaacccccactttgaaaaagtt

SEQ ID NO: 10860 - RNA, 31 nt, synthetic construct
  source 1..31: mol_type = other RNA
caaaccccgctttgaagatattccgggattt

SEQ ID NO: 10861 - RNA, 31 nt, synthetic construct
  source 1..31: mol_type = other RNA
caaaccccacttttttgaagttccgggattt

SEQ ID NO: 10862 - RNA, 44 nt, synthetic construct
  source 1..44: mol_type = other RNA
ggagatctgcaaaatgagctatgaccaggggcctgatagaagtt

SEQ ID NO: 10863 - RNA, 31 nt, synthetic construct
  source 1..31: mol_type = other RNA
ggagatcggtgaacccctctttgaagaagtt

SEQ ID NO: 10864 - RNA, 42 nt, synthetic construct
  source 1..42: mol_type = other RNA
tggtggagggtcggtgaacccctctttgaagaagttcctgga

SEQ ID NO: 10865 - RNA, 32 nt, synthetic construct
  source 1..32: mol_type = other RNA
tgcagtggtggagggtcggtgaaccccacttt

SEQ ID NO: 10866 - RNA, 41 nt, synthetic construct
  source 1..41: mol_type = other RNA
ctgcaaacccctccttgaggaagtttcgggattttctgttg

SEQ ID NO: 10867 - RNA, 31 nt, synthetic construct
  source 1..31: mol_type = other RNA
tgcagtggtggacgatggaaggccccacttt

SEQ ID NO: 10868 - RNA, 41 nt, synthetic construct
  source 1..41: mol_type = other RNA
agatctgcggaccccactttgaagaagttccgggattttct

SEQ ID NO: 10869 - RNA, 41 nt, synthetic construct
  source 1..41: mol_type = other RNA
tggtggagttgacaatggctccaatttgagaagttcctgga

SEQ ID NO: 10870 - RNA, 32 nt, synthetic construct
  source 1..32: mol_type = other RNA
gatctgcaaactctgttttgacagaagttcct

SEQ ID NO: 10871 - RNA, 32 nt, synthetic construct
  source 1..32: mol_type = other RNA
caaactctgttttgacagaagttccgggattt

SEQ ID NO: 10872 - RNA, 41 nt, synthetic construct
  source 1..41: mol_type = other RNA
tggtggaggtcggagaactccactttgagacagttcctgga

SEQ ID NO: 10873 - RNA, 41 nt, synthetic construct
  source 1..41: mol_type = other RNA
agatctgcagactccaattagaggaaattccgtgattttct

SEQ ID NO: 10874 - RNA, 31 nt, synthetic construct
  source 1..31: mol_type = other RNA
tgcagtaggtgccgtcggcagactccacttt

SEQ ID NO: 10875 - RNA, 31 nt, synthetic construct
  source 1..31: mol_type = other RNA
ggagatcggaaaactccactctgagaaagtt

SEQ ID NO: 10876 - RNA, 41 nt, synthetic construct
  source 1..41: mol_type = other RNA
tggtggaggtcggaaaactccactctgagaaagttcctgga

SEQ ID NO: 10877 - RNA, 31 nt, synthetic construct
  source 1..31: mol_type = other RNA
ggtggcgattgcaaaaccccactatgaagaa

SEQ ID NO: 10878 - RNA, 30 nt, synthetic construct
  source 1..30: mol_type = other RNA
caaacgccgatttgagaagtttcgggattt

SEQ ID NO: 10879 - RNA, 30 nt, synthetic construct
  source 1..30: mol_type = other RNA
ggtggagttcgtcaaaaccgacttaaagaa

SEQ ID NO: 10880 - RNA, 39 nt, synthetic construct
  source 1..39: mol_type = other RNA
gatctacccgccccactttgatctcctgcagaagttcct

SEQ ID NO: 10881 - RNA, 39 nt, synthetic construct
  source 1..39: mol_type = other RNA
caaaccccactttgatctcctgcagaagtcatcggattt

SEQ ID NO: 10882 - RNA, 31 nt, synthetic construct
  source 1..31: mol_type = other RNA
tgcagtggtggtaattggcaaactccacttt

SEQ ID NO: 10883 - RNA, 31 nt, synthetic construct
  source 1..31: mol_type = other RNA
caaactcctatttgcaggagtaccgggattt

SEQ ID NO: 10884 - RNA, 41 nt, synthetic construct
  source 1..41: mol_type = other RNA
ctgcaaaccccactttgtagaaatatagggagtttctgttg

SEQ ID NO: 10885 - RNA, 31 nt, synthetic construct
  source 1..31: mol_type = other RNA
ggtggatgtaggcatgctccacttagaagaa

SEQ ID NO: 10886 - RNA, 51 nt, synthetic construct
  source 1..51: mol_type = other RNA
ggagatttgcccataatacacccccaccccaccccccactttgaggaagtt

SEQ ID NO: 10887 - RNA, 31 nt, synthetic construct
  source 1..31: mol_type = other RNA
ggtggagatcggcaaaccccactttgaagaa

SEQ ID NO: 10888 - RNA, 31 nt, synthetic construct
  source 1..31: mol_type = other RNA
gatctgcagactccaaatagaggaagttcct

SEQ ID NO: 10889 - RNA, 31 nt, synthetic construct
  source 1..31: mol_type = other RNA
gatctgcaaaccccactttgaaggagttcct

SEQ ID NO: 10890 - RNA, 31 nt, synthetic construct
  source 1..31: mol_type = other RNA
ggagatcggtaaaccccactttcaagaagtt

SEQ ID NO: 10891 - RNA, 31 nt, synthetic construct
  source 1..31: mol_type = other RNA
ggtggaggtcggccgaccccactttgaagaa

SEQ ID NO: 10892 - RNA, 41 nt, synthetic construct
  source 1..41: mol_type = other RNA
tggtggagattggctgctcccactttggagaagttcctgga

SEQ ID NO: 10893 - RNA, 31 nt, synthetic construct
  source 1..31: mol_type = other RNA
caaactccactttgaggaagctccgcgattt

SEQ ID NO: 10894 - RNA, 37 nt, synthetic construct
  source 1..37: mol_type = other RNA
ctgcaaacccccctttgaacaagttccgtttctgttg

SEQ ID NO: 10895 - RNA, 31 nt, synthetic construct
  source 1..31: mol_type = other RNA
tgcagtggtggagattggtagttccaacttt

SEQ ID NO: 10896 - RNA, 31 nt, synthetic construct
  source 1..31: mol_type = other RNA
ggtggagattggtaaaccccaccttaaagaa

SEQ ID NO: 10897 - RNA, 32 nt, synthetic construct
  source 1..32: mol_type = other RNA
caaaccccaccttacaagaagttccgggattt

SEQ ID NO: 10898 - RNA, 31 nt, synthetic construct
  source 1..31: mol_type = other RNA
ggagatcggcgaaccctacggtgaagaagtt

SEQ ID NO: 10899 - RNA, 31 nt, synthetic construct
  source 1..31: mol_type = other RNA
gatctgcgaaccctacggtgaagaagttcct

SEQ ID NO: 10900 - RNA, 31 nt, synthetic construct
  source 1..31: mol_type = other RNA
ggagatcgacaattcccacttcggagaagtt

SEQ ID NO: 10901 - RNA, 31 nt, synthetic construct
  source 1..31: mol_type = other RNA
ggtggagatcgacaattcccacttcgaagaa

SEQ ID NO: 10902 - RNA, 31 nt, synthetic construct
  source 1..31: mol_type = other RNA
ggagatcgaaataccccactatgaagaagtt

SEQ ID NO: 10903 - RNA, 31 nt, synthetic construct
  source 1..31: mol_type = other RNA
ggtggatctcgaaataccccactatgaagaa

SEQ ID NO: 10904 - RNA, 31 nt, synthetic construct
  source 1..31: mol_type = other RNA
ggagatcggcacacccccctatgaagaagtt

SEQ ID NO: 10905 - RNA, 31 nt, synthetic construct
  source 1..31: mol_type = other RNA
gatctaagaacccccctttgaaaaagttcct

SEQ ID NO: 10906 - RNA, 31 nt, synthetic construct
  source 1..31: mol_type = other RNA
gatctgccaacccccctttgacgaagttcct

SEQ ID NO: 10907 - RNA, 31 nt, synthetic construct
  source 1..31: mol_type = other RNA
ggagatcggcaggacccactgtgaagaagtt

SEQ ID NO: 10908 - RNA, 31 nt, synthetic construct
  source 1..31: mol_type = other RNA
ggtggagatcggcaggacccactgtgaagaa

SEQ ID NO: 10909 - RNA, 31 nt, synthetic construct
  source 1..31: mol_type = other RNA
ggagatcggcgggccccaatccgaggaagtt

SEQ ID NO: 10910 - RNA, 31 nt, synthetic construct
  source 1..31: mol_type = other RNA
gatctgccaactcgactttgaggaagttcct

SEQ ID NO: 10911 - RNA, 31 nt, synthetic construct
  source 1..31: mol_type = other RNA
gatctgcaaactccaccttgaagaagttcct

SEQ ID NO: 10912 - RNA, 41 nt, synthetic construct
  source 1..41: mol_type = other RNA
tggtggagatcggcaaactccaccttgaagaagttcctgga

SEQ ID NO: 10913 - RNA, 31 nt, synthetic construct
  source 1..31: mol_type = other RNA
ggtggaaatcggcaaactccactttgaagaa

SEQ ID NO: 10914 - RNA, 31 nt, synthetic construct
  source 1..31: mol_type = other RNA
caaactccactttgaaggagttccgggattt

SEQ ID NO: 10915 - RNA, 42 nt, synthetic construct
  source 1..42: mol_type = other RNA
tggtggagacgagcaatgctccactttgtagaagttcctgga

SEQ ID NO: 10916 - RNA, 32 nt, synthetic construct
  source 1..32: mol_type = other RNA
gatctgcaaggtccaatttgaaattagttcct

SEQ ID NO: 10917 - RNA, 31 nt, synthetic construct
  source 1..31: mol_type = other RNA
tgcagtggcggagatcggcaaggtccacttt

SEQ ID NO: 10918 - RNA, 41 nt, synthetic construct
  source 1..41: mol_type = other RNA
agatctgcacatcccaatttgaggaagttccgggattttct

SEQ ID NO: 10919 - RNA, 31 nt, synthetic construct
  source 1..31: mol_type = other RNA
caaaccccaatttgaggaagttccgggattt

SEQ ID NO: 10920 - RNA, 31 nt, synthetic construct
  source 1..31: mol_type = other RNA
tgcagtggtggaggtcgcaaaactccacttt

SEQ ID NO: 10921 - RNA, 28 nt, synthetic construct
  source 1..28: mol_type = other RNA
tgcagtggtggaacgtcgaccccacttt

SEQ ID NO: 10922 - RNA, 31 nt, synthetic construct
  source 1..31: mol_type = other RNA
ggagatcggcaacccccactttgaagaagtt

SEQ ID NO: 10923 - RNA, 35 nt, synthetic construct
  source 1..35: mol_type = other RNA
ggagatctcaaagccccacttcaacaaaagaagtt

SEQ ID NO: 10924 - RNA, 31 nt, synthetic construct
  source 1..31: mol_type = other RNA
ggtggagatcgcaaagccccacttcaaagaa

SEQ ID NO: 10925 - RNA, 31 nt, synthetic construct
  source 1..31: mol_type = other RNA
tgcagtggtggagatcgcaaagccccacttt

SEQ ID NO: 10926 - RNA, 31 nt, synthetic construct
  source 1..31: mol_type = other RNA
ggagatcggcagcctccactttgaagaagtt

SEQ ID NO: 10927 - RNA, 31 nt, synthetic construct
  source 1..31: mol_type = other RNA
ggtggaaatcggcagcctccactttgaagaa

SEQ ID NO: 10928 - RNA, 41 nt, synthetic construct
  source 1..41: mol_type = other RNA
ctgcaaactccactttgagaaatagcgccgattttctgttg

SEQ ID NO: 10929 - RNA, 31 nt, synthetic construct
  source 1..31: mol_type = other RNA
ggtggacgtcggcagactccactttgaagaa

SEQ ID NO: 10930 - RNA, 47 nt, synthetic construct
  source 1..47: mol_type = other RNA
ggagatcggcaaactaaaaaccaatggtaaatatatgcatggaagtt

SEQ ID NO: 10931 - RNA, 41 nt, synthetic construct
  source 1..41: mol_type = other RNA
agatctgcacctccaactttgaagacgttccgggattttct

SEQ ID NO: 10932 - RNA, 31 nt, synthetic construct
  source 1..31: mol_type = other RNA
ggagatcgacacctccaactttgaagaagtt

SEQ ID NO: 10933 - RNA, 41 nt, synthetic construct
  source 1..41: mol_type = other RNA
agatctgcggagcccacttagaaggagtcctgggattttct

SEQ ID NO: 10934 - RNA, 31 nt, synthetic construct
  source 1..31: mol_type = other RNA
gatctgcggagcccacttagaaggagttcct

SEQ ID NO: 10935 - RNA, 33 nt, synthetic construct
  source 1..33: mol_type = other RNA
gatctactagatccactttgagggctggttcct

SEQ ID NO: 10936 - RNA, 31 nt, synthetic construct
  source 1..31: mol_type = other RNA
ggtggctgtcgactagatccactttgaagaa

SEQ ID NO: 10937 - RNA, 36 nt, synthetic construct
  source 1..36: mol_type = other RNA
caaactccactttgagggctggtctcaccgtgattt

SEQ ID NO: 10938 - RNA, 42 nt, synthetic construct
  source 1..42: mol_type = other RNA
caaaccccactttctagaagttccaaatcttgccgcggattt

SEQ ID NO: 10939 - RNA, 31 nt, synthetic construct
  source 1..31: mol_type = other RNA
ggagatcggaaaactcccctttgagaaagtt

SEQ ID NO: 10940 - RNA, 35 nt, synthetic construct
  source 1..35: mol_type = other RNA
gatctgcaaacgccacaggaaatggagaagttcct

SEQ ID NO: 10941 - RNA, 31 nt, synthetic construct
  source 1..31: mol_type = other RNA
ggtggcaatcggcaacccccactttgaagaa

SEQ ID NO: 10942 - RNA, 31 nt, synthetic construct
  source 1..31: mol_type = other RNA
caaacccctccttgaagaagttccgggattt

SEQ ID NO: 10943 - RNA, 31 nt, synthetic construct
  source 1..31: mol_type = other RNA
ggtggagatcggcaaaccccgctttgaagaa

SEQ ID NO: 10944 - RNA, 41 nt, synthetic construct
  source 1..41: mol_type = other RNA
tggtggagatcggcaaaccccgctttgaagatattcctgga

SEQ ID NO: 10945 - RNA, 31 nt, synthetic construct
  source 1..31: mol_type = other RNA
ggtggaattcggcagaccccacttttaagaa

SEQ ID NO: 10946 - RNA, 32 nt, synthetic construct
  source 1..32: mol_type = other RNA
ggtggagggtcggtgaacccctctttgaagaa

SEQ ID NO: 10947 - RNA, 41 nt, synthetic construct
  source 1..41: mol_type = other RNA
tggtggagctgggcaaggctccaatttgagaagttcctgga

SEQ ID NO: 10948 - RNA, 42 nt, synthetic construct
  source 1..42: mol_type = other RNA
tggtggagataggcaaactctgttttgacagaagttcctgga

SEQ ID NO: 10949 - RNA, 31 nt, synthetic construct
  source 1..31: mol_type = other RNA
tgcagtggtggggataggcaaactctacttt

SEQ ID NO: 10950 - RNA, 31 nt, synthetic construct
  source 1..31: mol_type = other RNA
ggtggagatcggcaaaccaccctctgaagaa

SEQ ID NO: 10951 - RNA, 31 nt, synthetic construct
  source 1..31: mol_type = other RNA
ggagatagcgcaaccccactttgtcgaagtt

SEQ ID NO: 10952 - RNA, 44 nt, synthetic construct
  source 1..44: mol_type = other RNA
ctgcaaactcatactttgataatcattcgggatgttttctgttg

SEQ ID NO: 10953 - RNA, 43 nt, synthetic construct
  source 1..43: mol_type = other RNA
tggtggagatcggaaaggctcatactttgataatcttcctgga

SEQ ID NO: 10954 - RNA, 31 nt, synthetic construct
  source 1..31: mol_type = other RNA
ggtggacgtcggagaactccactttgaagaa

SEQ ID NO: 10955 - RNA, 41 nt, synthetic construct
  source 1..41: mol_type = other RNA
tggtggaggtcggcagactccaattagaggaaattcctgga

SEQ ID NO: 10956 - RNA, 41 nt, synthetic construct
  source 1..41: mol_type = other RNA
ctgcaaactccacttagaggaagttccgggattttctgttg

SEQ ID NO: 10957 - RNA, 32 nt, synthetic construct
  source 1..32: mol_type = other RNA
ggtggagcgaggcaaggctccaggcaaaagaa

SEQ ID NO: 10958 - RNA, 31 nt, synthetic construct
  source 1..31: mol_type = other RNA
ggagattgcaaaaccccactatgaagaagtt

SEQ ID NO: 10959 - RNA, 31 nt, synthetic construct
  source 1..31: mol_type = other RNA
gatctgcaaactcctatttgcaggagttcct

SEQ ID NO: 10960 - RNA, 31 nt, synthetic construct
  source 1..31: mol_type = other RNA
ggtggggagcggcagaccccactttgaagaa

SEQ ID NO: 10961 - RNA, 43 nt, synthetic construct
  source 1..43: mol_type = other RNA
ggagatctgagagccccacacacacacacacttagaataagtt

SEQ ID NO: 10962 - RNA, 30 nt, synthetic construct
  source 1..30: mol_type = other RNA
caaaccccactgcaaggactttcgggattt

SEQ ID NO: 10963 - RNA, 31 nt, synthetic construct
  source 1..31: mol_type = other RNA
gatctgcaaaccccactttgaagaagttcct

SEQ ID NO: 10964 - RNA, 31 nt, synthetic construct
  source 1..31: mol_type = other RNA
caaaccccactttgatgaagttccgggattt

SEQ ID NO: 10965 - RNA, 31 nt, synthetic construct
  source 1..31: mol_type = other RNA
caaactccaaatagaggaagttccgggattt

SEQ ID NO: 10966 - RNA, 46 nt, synthetic construct
  source 1..46: mol_type = other RNA
agatctgcaaaccccaactttgacgtccgcagttcgaggattttct

SEQ ID NO: 10967 - RNA, 32 nt, synthetic construct
  source 1..32: mol_type = other RNA
ggtggggatcggcaaaccccaactttgaagaa

SEQ ID NO: 10968 - RNA, 36 nt, synthetic construct
  source 1..36: mol_type = other RNA
caaaccccaactttgacgtccgcagttcgaggattt

SEQ ID NO: 10969 - RNA, 31 nt, synthetic construct
  source 1..31: mol_type = other RNA
caaaccccactttcaagctattctgggattt

SEQ ID NO: 10970 - RNA, 31 nt, synthetic construct
  source 1..31: mol_type = other RNA
caaaccccagcttgaagaagttccgggattt

SEQ ID NO: 10971 - RNA, 49 nt, synthetic construct
  source 1..49: mol_type = other RNA
ctgcaaaccccaaactttgaagtagtagttttttcggggttttctgttg

SEQ ID NO: 10972 - RNA, 43 nt, synthetic construct
  source 1..43: mol_type = other RNA
agatctgcagactcccggcattgaagggtttccgggattttct

SEQ ID NO: 10973 - RNA, 33 nt, synthetic construct
  source 1..33: mol_type = other RNA
ggagatcggcagactcccggcattgaagaagtt

SEQ ID NO: 10974 - RNA, 30 nt, synthetic construct
  source 1..30: mol_type = other RNA
caaacccccctttgaacaagttccggattt

SEQ ID NO: 10975 - RNA, 31 nt, synthetic construct
  source 1..31: mol_type = other RNA
ggtggagattggcacttcccactttgaagaa

SEQ ID NO: 10976 - RNA, 31 nt, synthetic construct
  source 1..31: mol_type = other RNA
ggtggagatcggcgggccccaacttgaagaa

SEQ ID NO: 10977 - RNA, 41 nt, synthetic construct
  source 1..41: mol_type = other RNA
agatctgcacacccccctatgaagaagttccgtgattttct

SEQ ID NO: 10978 - RNA, 31 nt, synthetic construct
  source 1..31: mol_type = other RNA
ggtggagatcggcacacccccctatgaagaa

SEQ ID NO: 10979 - RNA, 31 nt, synthetic construct
  source 1..31: mol_type = other RNA
caaacccccctatgaagaagttccgtgattt

SEQ ID NO: 10980 - RNA, 31 nt, synthetic construct
  source 1..31: mol_type = other RNA
ggagatcgaagaacccccctttgaaaaagtt

SEQ ID NO: 10981 - RNA, 31 nt, synthetic construct
  source 1..31: mol_type = other RNA
caaaccccactgtgaagaagttccgggattt

SEQ ID NO: 10982 - RNA, 41 nt, synthetic construct
  source 1..41: mol_type = other RNA
tggtggagatcggcgggccccaatccgaggtagttcctgga

SEQ ID NO: 10983 - RNA, 41 nt, synthetic construct
  source 1..41: mol_type = other RNA
ctgcaaactccactttgaaggagttccgggattttctgttg

SEQ ID NO: 10984 - RNA, 31 nt, synthetic construct
  source 1..31: mol_type = other RNA
caaaccccactttgaagaagctccgggattt

SEQ ID NO: 10985 - RNA, 31 nt, synthetic construct
  source 1..31: mol_type = other RNA
ggtggagatcggcaaggtccaatttgaagaa

SEQ ID NO: 10986 - RNA, 42 nt, synthetic construct
  source 1..42: mol_type = other RNA
tggtggagatcggcaaggtccaatttgaaattagttcctgga

SEQ ID NO: 10987 - RNA, 31 nt, synthetic construct
  source 1..31: mol_type = other RNA
caaactccactttgaagaagttccgggattt

SEQ ID NO: 10988 - RNA, 31 nt, synthetic construct
  source 1..31: mol_type = other RNA
ggtgggcatcggcccaccccacgtggaagaa

SEQ ID NO: 10989 - RNA, 31 nt, synthetic construct
  source 1..31: mol_type = other RNA
caaactccacttcgacgaatttctgggattt

SEQ ID NO: 10990 - RNA, 28 nt, synthetic construct
  source 1..28: mol_type = other RNA
ggtggaacgtcgaccccactttgaagaa

SEQ ID NO: 10991 - RNA, 35 nt, synthetic construct
  source 1..35: mol_type = other RNA
caaaccccacttcaacaaaagaagttccgggattt

SEQ ID NO: 10992 - RNA, 41 nt, synthetic construct
  source 1..41: mol_type = other RNA
tggtggagaaaggcggactccaatttgtagaagttcctgga

SEQ ID NO: 10993 - RNA, 31 nt, synthetic construct
  source 1..31: mol_type = other RNA
caaactccaatttgtagaagttacgggattt

SEQ ID NO: 10994 - RNA, 31 nt, synthetic construct
  source 1..31: mol_type = other RNA
gatctgcagcctccactttgaaggagttcct

SEQ ID NO: 10995 - RNA, 41 nt, synthetic construct
  source 1..41: mol_type = other RNA
agatctgccaactccaactggaggaagttccgagattttct

SEQ ID NO: 10996 - RNA, 31 nt, synthetic construct
  source 1..31: mol_type = other RNA
caaactctacttcgaggaagttccgggattt

SEQ ID NO: 10997 - RNA, 46 nt, synthetic construct
  source 1..46: mol_type = other RNA
agatctgctagatccactttgagggctggtctcaccgtgattttct

SEQ ID NO: 10998 - RNA, 41 nt, synthetic construct
  source 1..41: mol_type = other RNA
ctgcagtgatggctgtcgactagatccactttgaagaagtt

SEQ ID NO: 10999 - RNA, 41 nt, synthetic construct
  source 1..41: mol_type = other RNA
tggtggagatcggaaaactcccctttgagaaagttcctgga

SEQ ID NO: 11000 - RNA, 31 nt, synthetic construct
  source 1..31: mol_type = other RNA
caaactcccctttgagaaagttgcgggattt

SEQ ID NO: 11001 - RNA, 41 nt, synthetic construct
  source 1..41: mol_type = other RNA
ctgcaaacccctctttgaagaagttccgggattttctgttg

SEQ ID NO: 11002 - RNA, 31 nt, synthetic construct
  source 1..31: mol_type = other RNA
gatctgtgaacccctctttgaagaagttcct

SEQ ID NO: 11003 - RNA, 31 nt, synthetic construct
  source 1..31: mol_type = other RNA
caaacccctctttgaagaaggtccgcgattt

SEQ ID NO: 11004 - RNA, 41 nt, synthetic construct
  source 1..41: mol_type = other RNA
tggtggagattggcaggcccctccttgaggaagttcctgga

SEQ ID NO: 11005 - RNA, 32 nt, synthetic construct
  source 1..32: mol_type = other RNA
ggagatggaaggccccactttaaaaagaagtt

SEQ ID NO: 11006 - RNA, 42 nt, synthetic construct
  source 1..42: mol_type = other RNA
tggtggagatggaaggccccactttaaaaagacgttcctgga

SEQ ID NO: 11007 - RNA, 32 nt, synthetic construct
  source 1..32: mol_type = other RNA
ggtggagttgacaatggctccaatttgaagaa

SEQ ID NO: 11008 - RNA, 31 nt, synthetic construct
  source 1..31: mol_type = other RNA
ggtggggataggcaaactctgttttgaagaa

SEQ ID NO: 11009 - RNA, 31 nt, synthetic construct
  source 1..31: mol_type = other RNA
ggagatcggcaaaccaccctctgaggaagtt

SEQ ID NO: 11010 - RNA, 33 nt, synthetic construct
  source 1..33: mol_type = other RNA
ggtggggatcggaaaggctcatactttgaagaa

SEQ ID NO: 11011 - RNA, 31 nt, synthetic construct
  source 1..31: mol_type = other RNA
ggagatcggcagactccaattagaggaagtt

SEQ ID NO: 11012 - RNA, 41 nt, synthetic construct
  source 1..41: mol_type = other RNA
tggtggagctaggcaaggctccaagccaagaagttcctgga

SEQ ID NO: 11013 - RNA, 30 nt, synthetic construct
  source 1..30: mol_type = other RNA
caaactccaggcaaagaagtttcgggattt

SEQ ID NO: 11014 - RNA, 42 nt, synthetic construct
  source 1..42: mol_type = other RNA
agatctgcaacagcgccgatttgagaagtttcgggattttct

SEQ ID NO: 11015 - RNA, 31 nt, synthetic construct
  source 1..31: mol_type = other RNA
ggagatgacaacagcgccgatttgagaagtt

SEQ ID NO: 11016 - RNA, 30 nt, synthetic construct
  source 1..30: mol_type = other RNA
gatctgtcaaaaccgacttaagaagttcct

SEQ ID NO: 11017 - RNA, 39 nt, synthetic construct
  source 1..39: mol_type = other RNA
ggagatctacccgccccactttgatctcctgcagaagtt

SEQ ID NO: 11018 - RNA, 31 nt, synthetic construct
  source 1..31: mol_type = other RNA
ggtggtaattggcaaactcctatttgaagaa

SEQ ID NO: 11019 - RNA, 31 nt, synthetic construct
  source 1..31: mol_type = other RNA
caaaccccactttgtagaaatatagggattt

SEQ ID NO: 11020 - RNA, 43 nt, synthetic construct
  source 1..43: mol_type = other RNA
ggtggaattctgagagccccacacacacacacacttagaagaa

SEQ ID NO: 11021 - RNA, 31 nt, synthetic construct
  source 1..31: mol_type = other RNA
ggagaacggaaaacccgtctttgaagaagtt

SEQ ID NO: 11022 - RNA, 45 nt, synthetic construct
  source 1..45: mol_type = other RNA
caaacccgtctttgaagtaaaaaaattctacaagcgaggggattt

SEQ ID NO: 11023 - RNA, 41 nt, synthetic construct
  source 1..41: mol_type = other RNA
tggtggaggtaggcatgctccacttagaggaagttcctgga

SEQ ID NO: 11024 - RNA, 55 nt, synthetic construct
  source 1..55: mol_type = other RNA
ggagatcgattgtctaaacccgcactccagcttggttgaaagagggagagaagtt

SEQ ID NO: 11025 - RNA, 36 nt, synthetic construct
  source 1..36: mol_type = other RNA
tgcagtggtggcatcgatggtctaaacccgcacttt

SEQ ID NO: 11026 - RNA, 51 nt, synthetic construct
  source 1..51: mol_type = other RNA
gatctgcccataatacacccccaccccaccccccactttgagggagttcct

SEQ ID NO: 11027 - RNA, 61 nt, synthetic construct
  source 1..61: mol_type = other RNA
tggtggagatttgcccataatacacccccaccccaccccccactttgagggagttcctgga

SEQ ID NO: 11028 - RNA, 50 nt, synthetic construct
  source 1..50: mol_type = other RNA
tgcagtggtgagatttgcccataatacacccccaccccaccccccacttt

SEQ ID NO: 11029 - RNA, 41 nt, synthetic construct
  source 1..41: mol_type = other RNA
ctgcaaactccaaatagaggaagttccgggattttctgttg

SEQ ID NO: 11030 - RNA, 49 nt, synthetic construct
  source 1..49: mol_type = other RNA
agatctgcaccccccaaactttgaagtagtagttttttcgggattttct

SEQ ID NO: 11031 - RNA, 33 nt, synthetic construct
  source 1..33: mol_type = other RNA
ggagatcggcaccccccaaactttgaagaagtt

SEQ ID NO: 11032 - RNA, 39 nt, synthetic construct
  source 1..39: mol_type = other RNA
caaaccccaaactttgaagtagtagttttttcgggattt

SEQ ID NO: 11033 - RNA, 43 nt, synthetic construct
  source 1..43: mol_type = other RNA
ctgcaaactcccggcattgaagggattccgggattttctgttg

SEQ ID NO: 11034 - RNA, 33 nt, synthetic construct
  source 1..33: mol_type = other RNA
caaactcccggcattgaagggattccgggattt

SEQ ID NO: 11035 - RNA, 31 nt, synthetic construct
  source 1..31: mol_type = other RNA
ggagatcggcaaacccccctttgaacaagtt

SEQ ID NO: 11036 - RNA, 31 nt, synthetic construct
  source 1..31: mol_type = other RNA
ggagattggtagttccaactttgaagaagtt

SEQ ID NO: 11037 - RNA, 41 nt, synthetic construct
  source 1..41: mol_type = other RNA
tggtggagattggtagttccaactttgaagaagttcctgga

SEQ ID NO: 11038 - RNA, 31 nt, synthetic construct
  source 1..31: mol_type = other RNA
caaaccctacggtgaagaagtagagggattt

SEQ ID NO: 11039 - RNA, 31 nt, synthetic construct
  source 1..31: mol_type = other RNA
caaaccccaacttgaaggagttccgggattt

SEQ ID NO: 11040 - RNA, 31 nt, synthetic construct
  source 1..31: mol_type = other RNA
caaaccccaatttgaaacagttctgagattt

SEQ ID NO: 11041 - RNA, 31 nt, synthetic construct
  source 1..31: mol_type = other RNA
ggtggagatcggaacacccccctttgaagaa

SEQ ID NO: 11042 - RNA, 32 nt, synthetic construct
  source 1..32: mol_type = other RNA
caaacccccctttgatagaagttctgggattt

SEQ ID NO: 11043 - RNA, 31 nt, synthetic construct
  source 1..31: mol_type = other RNA
caaaccccaatccgaggtagttccgagattt

SEQ ID NO: 11044 - RNA, 41 nt, synthetic construct
  source 1..41: mol_type = other RNA
agatctgccaactcgactttgaggaagttccgggattttct

SEQ ID NO: 11045 - RNA, 32 nt, synthetic construct
  source 1..32: mol_type = other RNA
ggagacgtgcaatgctccactttgtagaagtt

SEQ ID NO: 11046 - RNA, 32 nt, synthetic construct
  source 1..32: mol_type = other RNA
ggtggagacgagcaatgctccactttgaagaa

SEQ ID NO: 11047 - RNA, 41 nt, synthetic construct
  source 1..41: mol_type = other RNA
agatctgcccaccccacgtggaagaagttccgagattttct

SEQ ID NO: 11048 - RNA, 31 nt, synthetic construct
  source 1..31: mol_type = other RNA
caaaccccatattgaagaagttccgcgattt

SEQ ID NO: 11049 - RNA, 36 nt, synthetic construct
  source 1..36: mol_type = other RNA
tgcagtggtggagatcggcaaactaaaaaccacttt

SEQ ID NO: 11050 - RNA, 31 nt, synthetic construct
  source 1..31: mol_type = other RNA
ggtggagcttggcaggctccactttgaagaa

SEQ ID NO: 11051 - RNA, 43 nt, synthetic construct
  source 1..43: mol_type = other RNA
tggtggaggtcgactagatccactttgagggctggttcctgga

SEQ ID NO: 11052 - RNA, 52 nt, synthetic construct
  source 1..52: mol_type = other RNA
ctgcaaaccccactttctagaagttccaaatcttgccgcgggttttctgttg

SEQ ID NO: 11053 - RNA, 31 nt, synthetic construct
  source 1..31: mol_type = other RNA
ggtggcggtcggtgaacccctctttgaagaa

SEQ ID NO: 11054 - RNA, 41 nt, synthetic construct
  source 1..41: mol_type = other RNA
agatctgcgaacccctctttgaagaaggtccgcgattttct

SEQ ID NO: 11055 - RNA, 31 nt, synthetic construct
  source 1..31: mol_type = other RNA
ggagattggcaggcccctccttgaggaagtt

SEQ ID NO: 11056 - RNA, 33 nt, synthetic construct
  source 1..33: mol_type = other RNA
caaaccccactttaaaaagacgttttgggattt

SEQ ID NO: 11057 - RNA, 32 nt, synthetic construct
  source 1..32: mol_type = other RNA
gatctacaatggctccaatttgagaagttcct

SEQ ID NO: 11058 - RNA, 30 nt, synthetic construct
  source 1..30: mol_type = other RNA
caaactccaatttgagaagtttcgggattt

SEQ ID NO: 11059 - RNA, 33 nt, synthetic construct
  source 1..33: mol_type = other RNA
ggagatcggaaaggctcatactttgataaagtt

SEQ ID NO: 11060 - RNA, 41 nt, synthetic construct
  source 1..41: mol_type = other RNA
agatctgcgaactccactttgagacagttccgggattttct

SEQ ID NO: 11061 - RNA, 31 nt, synthetic construct
  source 1..31: mol_type = other RNA
gatctgcagactccaattagaggaaattcct

SEQ ID NO: 11062 - RNA, 31 nt, synthetic construct
  source 1..31: mol_type = other RNA
caaactccacttagaggaagttccgggattt

SEQ ID NO: 11063 - RNA, 40 nt, synthetic construct
  source 1..40: mol_type = other RNA
ctgcaaactccaggcaaagaagtttcgggattttctgttg

SEQ ID NO: 11064 - RNA, 31 nt, synthetic construct
  source 1..31: mol_type = other RNA
ggtggacgtcggaaaactccactctgaagaa

SEQ ID NO: 11065 - RNA, 41 nt, synthetic construct
  source 1..41: mol_type = other RNA
ctgcaaactcctatttgcaggagtaccggaagtttctgttg

SEQ ID NO: 11066 - RNA, 47 nt, synthetic construct
  source 1..47: mol_type = other RNA
caaaccccacacacacacacacttagaatttgagttggttgggattt

SEQ ID NO: 11067 - RNA, 31 nt, synthetic construct
  source 1..31: mol_type = other RNA
ggagataggcatgctccacttagaggaagtt

SEQ ID NO: 11068 - RNA, 29 nt, synthetic construct
  source 1..29: mol_type = other RNA
caaactccacttagaggaagccgggattt

SEQ ID NO: 11069 - RNA, 55 nt, synthetic construct
  source 1..55: mol_type = other RNA
ctgcagtggtggcatcgattgtctaaacccgcactccagcttggttgaagaagtt

SEQ ID NO: 11070 - RNA, 40 nt, synthetic construct
  source 1..40: mol_type = other RNA
agatctgcggacccccttggaggatgatccgggattttct

SEQ ID NO: 11071 - RNA, 60 nt, synthetic construct
  source 1..60: mol_type = other RNA
ctgcagtggtgagatttgcccataatacacccccaccccaccccccactttgaagaagtt

SEQ ID NO: 11072 - RNA, 41 nt, synthetic construct
  source 1..41: mol_type = other RNA
agatctgcaaaccccacattgaagaagttctgggattttct

SEQ ID NO: 11073 - RNA, 41 nt, synthetic construct
  source 1..41: mol_type = other RNA
ctgcaaaccccactttgaagaagttccggaattttctgttg

SEQ ID NO: 11074 - RNA, 31 nt, synthetic construct
  source 1..31: mol_type = other RNA
ggtggagatcggcgaaccctacggtgaagaa

SEQ ID NO: 11075 - RNA, 41 nt, synthetic construct
  source 1..41: mol_type = other RNA
ctgcaaactccaatttgaaattagaccgaaattttctgttg

SEQ ID NO: 11076 - RNA, 31 nt, synthetic construct
  source 1..31: mol_type = other RNA
ggagatcggcagactccactttgagaaagtt

SEQ ID NO: 11077 - RNA, 31 nt, synthetic construct
  source 1..31: mol_type = other RNA
tgcagtggtggaacgcggcggagcccacttt

SEQ ID NO: 11078 - RNA, 41 nt, synthetic construct
  source 1..41: mol_type = other RNA
agatctgcaaggctccaagccaagaagtttcgggattttct

SEQ ID NO: 11079 - RNA, 31 nt, synthetic construct
  source 1..31: mol_type = other RNA
caaactccactctgagaaagttccgggattt

SEQ ID NO: 11080 - RNA, 41 nt, synthetic construct
  source 1..41: mol_type = other RNA
tggtggagctgacaacagcgccgatttgagaagttcctgga

SEQ ID NO: 11081 - RNA, 32 nt, synthetic construct
  source 1..32: mol_type = other RNA
ggtggaggaacggaaaacccgtctttgaagaa

SEQ ID NO: 11082 - RNA, 45 nt, synthetic construct
  source 1..45: mol_type = other RNA
ggtggcatcgattgtctaaacccgcactccagcttggttgaagaa

SEQ ID NO: 11083 - RNA, 51 nt, synthetic construct
  source 1..51: mol_type = other RNA
ggtggagatttgcccataatacacccccaccccaccccccactttgaagaa

SEQ ID NO: 11084 - RNA, 42 nt, synthetic construct
  source 1..42: mol_type = other RNA
agatctgcaaaactccacttcgacgaatttctgggattttct

SEQ ID NO: 11085 - RNA, 41 nt, synthetic construct
  source 1..41: mol_type = other RNA
agatctgcggactccaatttgtagaagttacgggattttct

SEQ ID NO: 11086 - RNA, 33 nt, synthetic construct
  source 1..33: mol_type = other RNA
caaaccccactatgaagctaatatccgagattt

SEQ ID NO: 11087 - RNA, 57 nt, synthetic construct
  source 1..57: mol_type = other RNA
agatctgcgagccccacacacacacacacttagaatttgagttggttgggattttct

SEQ ID NO: 11088 - RNA, 30 nt, synthetic construct
  source 1..30: mol_type = other RNA
tgcagtgtggagcttggcaggctccacttt

SEQ ID NO: 11089 - RNA, 54 nt, synthetic construct
  source 1..54: mol_type = other RNA
agatctgcaaaatgagctatgaccaggggcctgataggattgatgggattttct

SEQ ID NO: 11090 - RNA, 41 nt, synthetic construct
  source 1..41: mol_type = other RNA
agatctgcaaggctccaatttgagaagttccgggattttct

SEQ ID NO: 11091 - RNA, 31 nt, synthetic construct
  source 1..31: mol_type = other RNA
tgcagtggtggaggtcggcaaatcccacttt

SEQ ID NO: 11092 - RNA, 31 nt, synthetic construct
  source 1..31: mol_type = other RNA
tgcagtggcggagatcgacgaaccccacttt

SEQ ID NO: 11093 - RNA, 31 nt, synthetic construct
  source 1..31: mol_type = other RNA
tgcagtggtggagatcggcacaccccacttt

SEQ ID NO: 11094 - RNA, 32 nt, synthetic construct
  source 1..32: mol_type = other RNA
tgcagtggtggagttgacaatggctccacttt

SEQ ID NO: 11095 - RNA, 41 nt, synthetic construct
  source 1..41: mol_type = other RNA
taggtgcttcattcctgggtacatcccacttggtttgagct

SEQ ID NO: 11096 - RNA, 41 nt, synthetic construct
  source 1..41: mol_type = other RNA
taggtgctttatttttagacgcttccgactaggtttgagct

SEQ ID NO: 11097 - RNA, 43 nt, synthetic construct
  source 1..43: mol_type = other RNA
taggtgctttattttaaggtacttcccagacttgatttgagct

SEQ ID NO: 11098 - RNA, 41 nt, synthetic construct
  source 1..41: mol_type = other RNA
taggtgctttatttataagtacttccgacttggtttgagct

SEQ ID NO: 11099 - RNA, 41 nt, synthetic construct
  source 1..41: mol_type = other RNA
taggtgctttatttttaggtacttcccacttggtttgagct

SEQ ID NO: 11100 - RNA, 41 nt, synthetic construct
  source 1..41: mol_type = other RNA
cagcagtaggtgctttatttataagtacttccgacttggtt

SEQ ID NO: 11101 - RNA, 41 nt, synthetic construct
  source 1..41: mol_type = other RNA
taggtgctttattttgaggtatttcccacttggtttgagct

SEQ ID NO: 11102 - RNA, 41 nt, synthetic construct
  source 1..41: mol_type = other RNA
cagcagtagatgctttatttttaggtattccccacttggtt

SEQ ID NO: 11103 - RNA, 42 nt, synthetic construct
  source 1..42: mol_type = other RNA
cagcagtagatgttttattgttaaggcacttccgacttggtt

SEQ ID NO: 11104 - RNA, 41 nt, synthetic construct
  source 1..41: mol_type = other RNA
taggtgctttatttttgggtatatccaacttggtttgagct

SEQ ID NO: 11105 - RNA, 41 nt, synthetic construct
  source 1..41: mol_type = other RNA
taggtgctttgtttataggtaattccgacttggtttgagct

SEQ ID NO: 11106 - RNA, 41 nt, synthetic construct
  source 1..41: mol_type = other RNA
taggtgctttgtttttaagtacttcccacttggtttgagct

SEQ ID NO: 11107 - RNA, 41 nt, synthetic construct
  source 1..41: mol_type = other RNA
cagcagtaggtgctttatttttagccacttcccacttggtt

SEQ ID NO: 11108 - RNA, 41 nt, synthetic construct
  source 1..41: mol_type = other RNA
taggtgctttatttttcggtacttcccatttggtttgagct

SEQ ID NO: 11109 - RNA, 41 nt, synthetic construct
  source 1..41: mol_type = other RNA
cagcagtaggtgccttgtttatagttactcccgacttggtt

SEQ ID NO: 11110 - RNA, 41 nt, synthetic construct
  source 1..41: mol_type = other RNA
cagcagtaggtgctttatttttaggtaattcccacttggtt

SEQ ID NO: 11111 - RNA, 41 nt, synthetic construct
  source 1..41: mol_type = other RNA
taggtgcttcatttctaggtatttcccacttggtttgagct

SEQ ID NO: 11112 - RNA, 41 nt, synthetic construct
  source 1..41: mol_type = other RNA
cagcagtagatgttttatatttgggtatttcccacttggtt

SEQ ID NO: 11113 - RNA, 41 nt, synthetic construct
  source 1..41: mol_type = other RNA
cagcagtagatgctttatttttaggtacttcccacttggtt

SEQ ID NO: 11114 - RNA, 41 nt, synthetic construct
  source 1..41: mol_type = other RNA
cagcagtaggtgctttgtttataggtaattccgacttggtt

SEQ ID NO: 11115 - RNA, 41 nt, synthetic construct
  source 1..41: mol_type = other RNA
taggtgctttatttttaggtatttcccacttggtttgagct

SEQ ID NO: 11116 - RNA, 41 nt, synthetic construct
  source 1..41: mol_type = other RNA
cagcagtagatcctgtattttaaggtacttccaacttggtt

SEQ ID NO: 11117 - RNA, 41 nt, synthetic construct
  source 1..41: mol_type = other RNA
taggtgctttccttttaggtaattcccacttggtttgagct

SEQ ID NO: 11118 - RNA, 39 nt, synthetic construct
  source 1..39: mol_type = other RNA
taggtgctttatttttaggtttcccacttggtttgagct

SEQ ID NO: 11119 - RNA, 40 nt, synthetic construct
  source 1..40: mol_type = other RNA
taggtgctttgtttatagttactcccgacttctttgagct

SEQ ID NO: 11120 - RNA, 41 nt, synthetic construct
  source 1..41: mol_type = other RNA
taggtgctttatttttgggtaaatcccacttggtttgagct

SEQ ID NO: 11121 - RNA, 41 nt, synthetic construct
  source 1..41: mol_type = other RNA
cagcagtaggtgctttatttttaggcaattcccacttggtt

SEQ ID NO: 11122 - RNA, 41 nt, synthetic construct
  source 1..41: mol_type = other RNA
cagcagtaggtgctttattcctaggtacttcccacttggtt

SEQ ID NO: 11123 - RNA, 39 nt, synthetic construct
  source 1..39: mol_type = other RNA
cagcagtaagtgctttatttttaggtttcccacttggtt

SEQ ID NO: 11124 - RNA, 41 nt, synthetic construct
  source 1..41: mol_type = other RNA
cagcagtaggtgctttatttttaggtctttcccacttggtt

SEQ ID NO: 11125 - RNA, 41 nt, synthetic construct
  source 1..41: mol_type = other RNA
cagcagtaggtgttttatttttgggtacttcccacttggtt

SEQ ID NO: 11126 - RNA, 41 nt, synthetic construct
  source 1..41: mol_type = other RNA
cagcagtaggtgccttatttttgggtacttcccacttggtt

SEQ ID NO: 11127 - RNA, 41 nt, synthetic construct
  source 1..41: mol_type = other RNA
taggtgctttattcataggtatttcccacttgttttgagct

SEQ ID NO: 11128 - RNA, 41 nt, synthetic construct
  source 1..41: mol_type = other RNA
cagcagtaggtgatttatttttagacgcttccgacttggtt

SEQ ID NO: 11129 - RNA, 41 nt, synthetic construct
  source 1..41: mol_type = other RNA
taggtgctttattctttgggatttcccacttgatttgagct

SEQ ID NO: 11130 - RNA, 41 nt, synthetic construct
  source 1..41: mol_type = other RNA
taggtgctttatttttcggtacttcccacttggtttgagct

SEQ ID NO: 11131 - RNA, 41 nt, synthetic construct
  source 1..41: mol_type = other RNA
taggtgctttattttgcgggatttcccacttggtttgagct

SEQ ID NO: 11132 - RNA, 41 nt, synthetic construct
  source 1..41: mol_type = other RNA
cagcagtaggtgctttatttctaggtaattcccacttggtt

SEQ ID NO: 11133 - RNA, 41 nt, synthetic construct
  source 1..41: mol_type = other RNA
cagcagtaggtgctttattctttgggatttcccacttggtt

SEQ ID NO: 11134 - RNA, 42 nt, synthetic construct
  source 1..42: mol_type = other RNA
taggtgctttattttgtaggtgcttccctcttggtttgagct

SEQ ID NO: 11135 - RNA, 41 nt, synthetic construct
  source 1..41: mol_type = other RNA
cagcagtaggttctttattttaaggtacttcccacttggtt

SEQ ID NO: 11136 - RNA, 41 nt, synthetic construct
  source 1..41: mol_type = other RNA
taggtgctttttttttaggtgtttcccacttagtttgagct

SEQ ID NO: 11137 - RNA, 41 nt, synthetic construct
  source 1..41: mol_type = other RNA
cagcagtagatgctttatttttaggtgcttcccacttggtt

SEQ ID NO: 11138 - RNA, 41 nt, synthetic construct
  source 1..41: mol_type = other RNA
cagcagtaggtgcttcatttttagatgcttcccacttggtt

SEQ ID NO: 11139 - RNA, 41 nt, synthetic construct
  source 1..41: mol_type = other RNA
cagcagtaggtgctttatttttaggtgcttccgacttggtt

SEQ ID NO: 11140 - RNA, 41 nt, synthetic construct
  source 1..41: mol_type = other RNA
cagcagtaggtgcttcattcctgggtacatcccacttggtt

SEQ ID NO: 11141 - RNA, 40 nt, synthetic construct
  source 1..40: mol_type = other RNA
cagcagtagatgctttattttaggtacttcccacttggtt

SEQ ID NO: 11142 - RNA, 41 nt, synthetic construct
  source 1..41: mol_type = other RNA
taggtgctttattcctaggtacttcccacttggtttgagct

SEQ ID NO: 11143 - RNA, 41 nt, synthetic construct
  source 1..41: mol_type = other RNA
cagcagtaggtgctttatccttaggtacttcccacttggtt

SEQ ID NO: 11144 - RNA, 41 nt, synthetic construct
  source 1..41: mol_type = other RNA
cagcagtaggtgctttatttttgggtatatccaacttggtt

SEQ ID NO: 11145 - RNA, 41 nt, synthetic construct
  source 1..41: mol_type = other RNA
taggtgctttatttttgggtacttcccacctgatttgagct

SEQ ID NO: 11146 - RNA, 41 nt, synthetic construct
  source 1..41: mol_type = other RNA
taggtgctttatttttagatacttcccacttggtttgagct

SEQ ID NO: 11147 - RNA, 31 nt, synthetic construct
  source 1..31: mol_type = other RNA
aggtgctttatttttaggtgcttccgacttg

SEQ ID NO: 11148 - RNA, 41 nt, synthetic construct
  source 1..41: mol_type = other RNA
taggtgctttattattaggtgcttcccagctggtttgagct

SEQ ID NO: 11149 - RNA, 41 nt, synthetic construct
  source 1..41: mol_type = other RNA
taggtgctttatttttacgtacttcccgcttggtttgagct

SEQ ID NO: 11150 - RNA, 41 nt, synthetic construct
  source 1..41: mol_type = other RNA
taggtgctttcattttagatacatcccacttagtttgagct

SEQ ID NO: 11151 - RNA, 41 nt, synthetic construct
  source 1..41: mol_type = other RNA
taggtgctttatttttgggtttgtcccacttggtttgagct

SEQ ID NO: 11152 - RNA, 41 nt, synthetic construct
  source 1..41: mol_type = other RNA
taggtgctttatttttgggtacttcccacatggtttgagct

SEQ ID NO: 11153 - RNA, 42 nt, synthetic construct
  source 1..42: mol_type = other RNA
cagcagtaggtgctttattttgtaggtgcttcccacttggtt

SEQ ID NO: 11154 - RNA, 40 nt, synthetic construct
  source 1..40: mol_type = other RNA
taggtgctttattcctaggtaattcccactgatttgagct

SEQ ID NO: 11155 - RNA, 41 nt, synthetic construct
  source 1..41: mol_type = other RNA
cagcagtaggtgcgttattcataggtatttcccacttggtt

SEQ ID NO: 11156 - RNA, 41 nt, synthetic construct
  source 1..41: mol_type = other RNA
taggtgcttcatttttagatgcttcccactaggtttgagct

SEQ ID NO: 11157 - RNA, 41 nt, synthetic construct
  source 1..41: mol_type = other RNA
taggtgctttatttttaggtgcttccctcctggtttgagct

SEQ ID NO: 11158 - RNA, 41 nt, synthetic construct
  source 1..41: mol_type = other RNA
taggtgctttattcttaggtactttccacttggtttgagct

SEQ ID NO: 11159 - RNA, 31 nt, synthetic construct
  source 1..31: mol_type = other RNA
aggtgctttattcctaggtaattcccacttg

SEQ ID NO: 11160 - RNA, 41 nt, synthetic construct
  source 1..41: mol_type = other RNA
taggtgctttattccgaggtgttacccacttcgtttgagct

SEQ ID NO: 11161 - RNA, 31 nt, synthetic construct
  source 1..31: mol_type = other RNA
aggtgctttatttttaggtatttcccacttg

SEQ ID NO: 11162 - RNA, 41 nt, synthetic construct
  source 1..41: mol_type = other RNA
taggtgctttatccttaggtacttcccacttggtttgagct

SEQ ID NO: 11163 - RNA, 31 nt, synthetic construct
  source 1..31: mol_type = other RNA
aggtgctgtattttaaggtacttccaacttg

SEQ ID NO: 11164 - RNA, 41 nt, synthetic construct
  source 1..41: mol_type = other RNA
cagcagtaggtgttttatttttaggtaactcccacttggtt

SEQ ID NO: 11165 - RNA, 41 nt, synthetic construct
  source 1..41: mol_type = other RNA
taggtgctttatttttaggtacttcccacttgctttgagct

SEQ ID NO: 11166 - RNA, 32 nt, synthetic construct
  source 1..32: mol_type = other RNA
tttagatactgtttccaattggttgagctgtt

SEQ ID NO: 11167 - RNA, 42 nt, synthetic construct
  source 1..42: mol_type = other RNA
taggtgctttattgttaaggcacttccgtcttggtttgagct

SEQ ID NO: 11168 - RNA, 41 nt, synthetic construct
  source 1..41: mol_type = other RNA
cagcagtaggtgttttgtttttaggtatcccccacttggtt

SEQ ID NO: 11169 - RNA, 41 nt, synthetic construct
  source 1..41: mol_type = other RNA
cagcagtaggtcctttatttttcggtacttcccacttggtt

SEQ ID NO: 11170 - RNA, 41 nt, synthetic construct
  source 1..41: mol_type = other RNA
taggtgctctatccttaggtacctcccacttggtttgagct

SEQ ID NO: 11171 - RNA, 41 nt, synthetic construct
  source 1..41: mol_type = other RNA
cagcagtaggtgctttatttttaggtacttcccacttggtt

SEQ ID NO: 11172 - RNA, 41 nt, synthetic construct
  source 1..41: mol_type = other RNA
cagcagtagatgttatattcttatgtaactcccacttggtt

SEQ ID NO: 11173 - RNA, 41 nt, synthetic construct
  source 1..41: mol_type = other RNA
taggtgctttatttttaggtattccccactgggtttgagct

SEQ ID NO: 11174 - RNA, 42 nt, synthetic construct
  source 1..42: mol_type = other RNA
cagcagtaggtgctttatttggcggtacttttccacttggtt

SEQ ID NO: 11175 - RNA, 41 nt, synthetic construct
  source 1..41: mol_type = other RNA
taggtgctttatccttaggtacctcccacttggtttgagct

SEQ ID NO: 11176 - RNA, 41 nt, synthetic construct
  source 1..41: mol_type = other RNA
cagcagtaggtgctttccttttaggtaattcccacttggtt

SEQ ID NO: 11177 - RNA, 41 nt, synthetic construct
  source 1..41: mol_type = other RNA
aggtacttcccactaggtttgagcggtttggggaggtggtg

SEQ ID NO: 11178 - RNA, 41 nt, synthetic construct
  source 1..41: mol_type = other RNA
cagcagtaggtgctttattcttaggtactttccacttggtt

SEQ ID NO: 11179 - RNA, 41 nt, synthetic construct
  source 1..41: mol_type = other RNA
taggtgctttattgctagacagttcccactaggtttgagct

SEQ ID NO: 11180 - RNA, 31 nt, synthetic construct
  source 1..31: mol_type = other RNA
aggtgccttatttttgggtacttcccacttg

SEQ ID NO: 11181 - RNA, 41 nt, synthetic construct
  source 1..41: mol_type = other RNA
cagcagtaggtgcttcatttctaggtatttcccacttggtt

SEQ ID NO: 11182 - RNA, 41 nt, synthetic construct
  source 1..41: mol_type = other RNA
cagcagtaggtgctttatttataggtacttgccacttggtt

SEQ ID NO: 11183 - RNA, 41 nt, synthetic construct
  source 1..41: mol_type = other RNA
taggtgctttatttttagccacttcccacttaatttgagct

SEQ ID NO: 11184 - RNA, 41 nt, synthetic construct
  source 1..41: mol_type = other RNA
cagcagtaggtggtttatccttaggtacctcccacttggtt

SEQ ID NO: 11185 - RNA, 41 nt, synthetic construct
  source 1..41: mol_type = other RNA
taggtgctttattattaggtattttccacttggtttgagct

SEQ ID NO: 11186 - RNA, 31 nt, synthetic construct
  source 1..31: mol_type = other RNA
aggtgctttatttttaggtctttcccacttg

SEQ ID NO: 11187 - RNA, 41 nt, synthetic construct
  source 1..41: mol_type = other RNA
taggtgcttttttgttaggtacttcccactaggtttgagct

SEQ ID NO: 11188 - RNA, 41 nt, synthetic construct
  source 1..41: mol_type = other RNA
cagcagtaggtgctttatttttaggtgcttcctacttggtt

SEQ ID NO: 11189 - RNA, 43 nt, synthetic construct
  source 1..43: mol_type = other RNA
taggtgctttatttttaggtaactcccaaacttggtttgagct

SEQ ID NO: 11190 - RNA, 41 nt, synthetic construct
  source 1..41: mol_type = other RNA
ctttatttttgggtaaatcccacttggtttgagctgtttga

SEQ ID NO: 11191 - RNA, 41 nt, synthetic construct
  source 1..41: mol_type = other RNA
taggtgctctatcgttagagcattcccacttggtttgagct

SEQ ID NO: 11192 - RNA, 31 nt, synthetic construct
  source 1..31: mol_type = other RNA
aggtgttttatttttgggtacttcccacttg

SEQ ID NO: 11193 - RNA, 31 nt, synthetic construct
  source 1..31: mol_type = other RNA
aggtgctttatttttaggtccttcccacttg

SEQ ID NO: 11194 - RNA, 41 nt, synthetic construct
  source 1..41: mol_type = other RNA
taggtgcttggttttcaggtacttcccacttggtttgagct

SEQ ID NO: 11195 - RNA, 41 nt, synthetic construct
  source 1..41: mol_type = other RNA
taggtgctttatttttaggtgcttcctacggggtttgagct

SEQ ID NO: 11196 - RNA, 31 nt, synthetic construct
  source 1..31: mol_type = other RNA
aggtgctttatccttaggtacttcccacttg

SEQ ID NO: 11197 - RNA, 41 nt, synthetic construct
  source 1..41: mol_type = other RNA
cagcagtaggtgctttatttttgggtttgtcccacttggtt

SEQ ID NO: 11198 - RNA, 41 nt, synthetic construct
  source 1..41: mol_type = other RNA
cagcagtaggtgcttttttgttaggtacttcccacttggtt

SEQ ID NO: 11199 - RNA, 41 nt, synthetic construct
  source 1..41: mol_type = other RNA
taggtgctgtatttttaggtacttcccacttggtttgagct

SEQ ID NO: 11200 - RNA, 41 nt, synthetic construct
  source 1..41: mol_type = other RNA
taggtgctatattcttatgtaactcccacttgctttgagct

SEQ ID NO: 11201 - RNA, 41 nt, synthetic construct
  source 1..41: mol_type = other RNA
cagcagtaggtgctttattgctagacagttcccacttggtt

SEQ ID NO: 11202 - RNA, 45 nt, synthetic construct
  source 1..45: mol_type = other RNA
taggtgctttatttataggtacttgccacaggaaaggtttgagct

SEQ ID NO: 11203 - RNA, 41 nt, synthetic construct
  source 1..41: mol_type = other RNA
ctttatttataggtaattccgacttggtttgtgctgtttga

SEQ ID NO: 11204 - RNA, 31 nt, synthetic construct
  source 1..31: mol_type = other RNA
aggtgctttatttttaggcaattcccacttg

SEQ ID NO: 11205 - RNA, 41 nt, synthetic construct
  source 1..41: mol_type = other RNA
cagcagtaggtgctttatttttaggtccttcccacttggtt

SEQ ID NO: 11206 - RNA, 41 nt, synthetic construct
  source 1..41: mol_type = other RNA
taggtgctctattattagataactccaacttggtttgagct

SEQ ID NO: 11207 - RNA, 41 nt, synthetic construct
  source 1..41: mol_type = other RNA
cagcagtaggtgctttattcctaggtaattcccacttggtt

SEQ ID NO: 11208 - RNA, 31 nt, synthetic construct
  source 1..31: mol_type = other RNA
aggtgctttatttttaggtacttcccacttg

SEQ ID NO: 11209 - RNA, 41 nt, synthetic construct
  source 1..41: mol_type = other RNA
cagcagtaggtgctttattattaggtgcttcccacttggtt

SEQ ID NO: 11210 - RNA, 41 nt, synthetic construct
  source 1..41: mol_type = other RNA
ctttatttttagataactccaacttggtttgcgctgtttga

SEQ ID NO: 11211 - RNA, 41 nt, synthetic construct
  source 1..41: mol_type = other RNA
ctttatttttgggtatatccaacttggtttgagctgtttga

SEQ ID NO: 11212 - RNA, 31 nt, synthetic construct
  source 1..31: mol_type = other RNA
aggtgctttattcctaggtacttcccacttg

SEQ ID NO: 11213 - RNA, 32 nt, synthetic construct
  source 1..32: mol_type = other RNA
aggtgctttattttgtaggtgcttcccacttg

SEQ ID NO: 11214 - RNA, 41 nt, synthetic construct
  source 1..41: mol_type = other RNA
taggtgctttatttttaggtctttcccacttggtttgagct

SEQ ID NO: 11215 - RNA, 41 nt, synthetic construct
  source 1..41: mol_type = other RNA
cagcagtaggtacttcctttttaggtacttcccacttggtt

SEQ ID NO: 11216 - RNA, 41 nt, synthetic construct
  source 1..41: mol_type = other RNA
taggtgctttatttttaggtgcttccgaattggtttgagct

SEQ ID NO: 11217 - RNA, 41 nt, synthetic construct
  source 1..41: mol_type = other RNA
cagcagtaggtgctttttttttaggtgtttcccacttggtt

SEQ ID NO: 11218 - RNA, 41 nt, synthetic construct
  source 1..41: mol_type = other RNA
ctttatttttagatacatcccacttagtttgggctgtttga

SEQ ID NO: 11219 - RNA, 41 nt, synthetic construct
  source 1..41: mol_type = other RNA
cagcagtaggtgctttcattttagatacatcccacttggtt

SEQ ID NO: 11220 - RNA, 41 nt, synthetic construct
  source 1..41: mol_type = other RNA
taggtgctttatttttaggtaattccccctaggtttgagct

SEQ ID NO: 11221 - RNA, 41 nt, synthetic construct
  source 1..41: mol_type = other RNA
ctttatttttcggtacttcccacctggtttgagctgtttga

SEQ ID NO: 11222 - RNA, 43 nt, synthetic construct
  source 1..43: mol_type = other RNA
taggtgcttgatttttagggaattttcatacttggtttgagct

SEQ ID NO: 11223 - RNA, 31 nt, synthetic construct
  source 1..31: mol_type = other RNA
aggtgctttatttttgggtatatccaacttg

SEQ ID NO: 11224 - RNA, 53 nt, synthetic construct
  source 1..53: mol_type = other RNA
taggtgctttattcataggcgcttcccacacacacacacacttcgtttgagct

SEQ ID NO: 11225 - RNA, 31 nt, synthetic construct
  source 1..31: mol_type = other RNA
aggtgctttgtttataggtaattccgacttg

SEQ ID NO: 11226 - RNA, 31 nt, synthetic construct
  source 1..31: mol_type = other RNA
aggtgctttatttataagtacttccgacttg

SEQ ID NO: 11227 - RNA, 31 nt, synthetic construct
  source 1..31: mol_type = other RNA
aggtgcttcatttttagatgcttcccacttg

SEQ ID NO: 11228 - RNA, 31 nt, synthetic construct
  source 1..31: mol_type = other RNA
aggtgctttatttttaggtattccccacttg

SEQ ID NO: 11229 - RNA, 31 nt, synthetic construct
  source 1..31: mol_type = other RNA
aggtgctttatttctaggtaattcccacttg

SEQ ID NO: 11230 - RNA, 43 nt, synthetic construct
  source 1..43: mol_type = other RNA
cagcagtagcgtgactttgtctttggtaacttcccacttggtt

SEQ ID NO: 11231 - RNA, 42 nt, synthetic construct
  source 1..42: mol_type = other RNA
taggtgcttcctttttaggtacttcccaacttggtttgagct

SEQ ID NO: 11232 - RNA, 41 nt, synthetic construct
  source 1..41: mol_type = other RNA
taggtgcttttttattaggtactttccacctggtttgagct

SEQ ID NO: 11233 - RNA, 41 nt, synthetic construct
  source 1..41: mol_type = other RNA
ctttatttttaggtgtttcccacttagtttgagctgtttga

SEQ ID NO: 11234 - RNA, 31 nt, synthetic construct
  source 1..31: mol_type = other RNA
aggtgctttatttttcggtacttcccacttg

SEQ ID NO: 11235 - RNA, 41 nt, synthetic construct
  source 1..41: mol_type = other RNA
cagcagtaggtgctcgatttttaggtacttcccacttggtt

SEQ ID NO: 11236 - RNA, 41 nt, synthetic construct
  source 1..41: mol_type = other RNA
taggtgcttcatttttaggtactatccaattggtttgagct

SEQ ID NO: 11237 - RNA, 41 nt, synthetic construct
  source 1..41: mol_type = other RNA
ctttatttctgggtacatcccacttggtttgagctgtttga

SEQ ID NO: 11238 - RNA, 41 nt, synthetic construct
  source 1..41: mol_type = other RNA
ctttatttttatgtaactcccacttgcattgagctgtttga

SEQ ID NO: 11239 - RNA, 41 nt, synthetic construct
  source 1..41: mol_type = other RNA
taggtgctctatcgttagattctctccacttggtttgagct

SEQ ID NO: 11240 - RNA, 41 nt, synthetic construct
  source 1..41: mol_type = other RNA
cagcagtaggagccttattttgaggtatttcccacttggtt

SEQ ID NO: 11241 - RNA, 31 nt, synthetic construct
  source 1..31: mol_type = other RNA
aggtgcttcatttctaggtatttcccacttg

SEQ ID NO: 11242 - RNA, 41 nt, synthetic construct
  source 1..41: mol_type = other RNA
cagcagtaagcgctctatccttaggtacctcccacttggtt

SEQ ID NO: 11243 - RNA, 41 nt, synthetic construct
  source 1..41: mol_type = other RNA
ctttatttttagacgcttccgactaggttcgagctgtttga

SEQ ID NO: 11244 - RNA, 31 nt, synthetic construct
  source 1..31: mol_type = other RNA
aggtgctttatttttaggtaattcccacttg

SEQ ID NO: 11245 - RNA, 41 nt, synthetic construct
  source 1..41: mol_type = other RNA
cagcagtaggtgcttttttattaggtcattcccacttggtt

SEQ ID NO: 11246 - RNA, 31 nt, synthetic construct
  source 1..31: mol_type = other RNA
aggtgctttatttataggtacttgccacttg

SEQ ID NO: 11247 - RNA, 29 nt, synthetic construct
  source 1..29: mol_type = other RNA
aggtgctttatttttaggtttcccacttg

SEQ ID NO: 11248 - RNA, 41 nt, synthetic construct
  source 1..41: mol_type = other RNA
taggtgcttttttattaggtcattcccacgttgtttgagct

SEQ ID NO: 11249 - RNA, 41 nt, synthetic construct
  source 1..41: mol_type = other RNA
cagcagtaggtccattatttttagatacttcccacttggtt

SEQ ID NO: 11250 - RNA, 42 nt, synthetic construct
  source 1..42: mol_type = other RNA
taggtgctttatttggcggtacttttccaattggtttgagct

SEQ ID NO: 11251 - RNA, 31 nt, synthetic construct
  source 1..31: mol_type = other RNA
aggtgctttatttttagacgcttcccacttg

SEQ ID NO: 11252 - RNA, 41 nt, synthetic construct
  source 1..41: mol_type = other RNA
cagcagtaggtcctttattcataggcgcttcccacttggtt

SEQ ID NO: 11253 - RNA, 41 nt, synthetic construct
  source 1..41: mol_type = other RNA
taggtgctctactgttcggtagtttccacttcgtttgagct

SEQ ID NO: 11254 - RNA, 41 nt, synthetic construct
  source 1..41: mol_type = other RNA
taggtgctttttttttaggtgtttcccaatcagtttgagct

SEQ ID NO: 11255 - RNA, 41 nt, synthetic construct
  source 1..41: mol_type = other RNA
cagcagtaggtgctttatttttaggtattttccacttggtt

SEQ ID NO: 11256 - RNA, 40 nt, synthetic construct
  source 1..40: mol_type = other RNA
taggtgctttattttaggtacttcccacttggtttgagct

SEQ ID NO: 11257 - RNA, 41 nt, synthetic construct
  source 1..41: mol_type = other RNA
cagcagtaggtgctctattattaggcactttccacttggtt

SEQ ID NO: 11258 - RNA, 31 nt, synthetic construct
  source 1..31: mol_type = other RNA
aggtgctttatttttaggtattttccacttg

SEQ ID NO: 11259 - RNA, 31 nt, synthetic construct
  source 1..31: mol_type = other RNA
aggtgctttatttttgggtttgtcccacttg

SEQ ID NO: 11260 - RNA, 41 nt, synthetic construct
  source 1..41: mol_type = other RNA
cagcagtaggtgctctatcgttagagcattcccacttggtt

SEQ ID NO: 11261 - RNA, 31 nt, synthetic construct
  source 1..31: mol_type = other RNA
aggtgctttattcataggcgcttcccacttg

SEQ ID NO: 11262 - RNA, 41 nt, synthetic construct
  source 1..41: mol_type = other RNA
ctttatttttaggtattccccactgggtttgagctgtttga

SEQ ID NO: 11263 - RNA, 41 nt, synthetic construct
  source 1..41: mol_type = other RNA
cagcagtaggtgctttatttttagtaactttccacttggtt

SEQ ID NO: 11264 - RNA, 31 nt, synthetic construct
  source 1..31: mol_type = other RNA
aggtgctttccttttaggtaattcccacttg

SEQ ID NO: 11265 - RNA, 41 nt, synthetic construct
  source 1..41: mol_type = other RNA
taggtgctttgtctttggtaacttcccactaggtttgagct

SEQ ID NO: 11266 - RNA, 41 nt, synthetic construct
  source 1..41: mol_type = other RNA
cagcagtaagtgatttatttttgggtaaatcccacttggtt

SEQ ID NO: 11267 - RNA, 41 nt, synthetic construct
  source 1..41: mol_type = other RNA
taggtgctttatttttaggtccttcccccttggtttgagct

SEQ ID NO: 11268 - RNA, 41 nt, synthetic construct
  source 1..41: mol_type = other RNA
taggtgctctattattaggcgctttccacttggtttgagct

SEQ ID NO: 11269 - RNA, 31 nt, synthetic construct
  source 1..31: mol_type = other RNA
aggtgttttgtttttaggtatcccccacttg

SEQ ID NO: 11270 - RNA, 43 nt, synthetic construct
  source 1..43: mol_type = other RNA
ctttattttaaggtacttcccagacttgatttgagctgtttga

SEQ ID NO: 11271 - RNA, 42 nt, synthetic construct
  source 1..42: mol_type = other RNA
ctttatttttcggtacttcccacttggtcctgagctgtttga

SEQ ID NO: 11272 - RNA, 41 nt, synthetic construct
  source 1..41: mol_type = other RNA
ctttatttttaggtacctcccacttggttcgagctgtttga

SEQ ID NO: 11273 - RNA, 31 nt, synthetic construct
  source 1..31: mol_type = other RNA
aggtgctttatttttacgtacttcccacttg

SEQ ID NO: 11274 - RNA, 41 nt, synthetic construct
  source 1..41: mol_type = other RNA
taggtgctttttttttaggtgtttcccaactggtttgagct

SEQ ID NO: 11275 - RNA, 31 nt, synthetic construct
  source 1..31: mol_type = other RNA
aggtgctgtatttttaggtacttcccacttg

SEQ ID NO: 11276 - RNA, 41 nt, synthetic construct
  source 1..41: mol_type = other RNA
ctttatttttaggtgcttccgaattggtttgagctgtttga

SEQ ID NO: 11277 - RNA, 41 nt, synthetic construct
  source 1..41: mol_type = other RNA
ctttatttttagatgcttcccactaggtttgagctgtttga

SEQ ID NO: 11278 - RNA, 31 nt, synthetic construct
  source 1..31: mol_type = other RNA
aggtgctttatttttaggtgcttcccacttg

SEQ ID NO: 11279 - RNA, 31 nt, synthetic construct
  source 1..31: mol_type = other RNA
aggtgcttcctttttaggtacttcccacttg

SEQ ID NO: 11280 - RNA, 31 nt, synthetic construct
  source 1..31: mol_type = other RNA
aggtgctttattattaggtgcttcccacttg

SEQ ID NO: 11281 - RNA, 31 nt, synthetic construct
  source 1..31: mol_type = other RNA
aggtgctttattttaaggtacttcccacttg

SEQ ID NO: 11282 - RNA, 31 nt, synthetic construct
  source 1..31: mol_type = other RNA
aggtgctcgatttttaggtacttcccacttg

SEQ ID NO: 11283 - RNA, 39 nt, synthetic construct
  source 1..39: mol_type = other RNA
taggtgctttatttaggtatttcccacttggtttgagct

SEQ ID NO: 11284 - RNA, 31 nt, synthetic construct
  source 1..31: mol_type = other RNA
aggtgctttatttttagccacttcccacttg

SEQ ID NO: 11285 - RNA, 41 nt, synthetic construct
  source 1..41: mol_type = other RNA
cagcagtagaggctttatttttacgtacttcccacttggtt

SEQ ID NO: 11286 - RNA, 31 nt, synthetic construct
  source 1..31: mol_type = other RNA
aggtgctttatacttgggtactttccacttg

SEQ ID NO: 11287 - RNA, 41 nt, synthetic construct
  source 1..41: mol_type = other RNA
cagcagtaggtgccttttttttaggtgtttcccacttggtt

SEQ ID NO: 11288 - RNA, 41 nt, synthetic construct
  source 1..41: mol_type = other RNA
ctttatttttaggtacctcccacttggtttgggctgtttga

SEQ ID NO: 11289 - RNA, 41 nt, synthetic construct
  source 1..41: mol_type = other RNA
aggtacttcccactaggtttgagcggtttgaggaggtggtg

SEQ ID NO: 11290 - RNA, 41 nt, synthetic construct
  source 1..41: mol_type = other RNA
taggtgctttatttttagtaactttccacttagtttgagct

SEQ ID NO: 11291 - RNA, 42 nt, synthetic construct
  source 1..42: mol_type = other RNA
ctttatttttgggtacttcccacctgactttgagctgtttga

SEQ ID NO: 11292 - RNA, 41 nt, synthetic construct
  source 1..41: mol_type = other RNA
aggtacttcctacggggtttgagtgccttaaggaggtggtg

SEQ ID NO: 11293 - RNA, 42 nt, synthetic construct
  source 1..42: mol_type = other RNA
cagcagtaggggctttattttagaacacaactccacttggtt

SEQ ID NO: 11294 - RNA, 41 nt, synthetic construct
  source 1..41: mol_type = other RNA
taggtgctctgttgttaggcactttccccttggtttgagct

SEQ ID NO: 11295 - RNA, 32 nt, synthetic construct
  source 1..32: mol_type = other RNA
atttttcggtactttctgtttggtcttgagct

SEQ ID NO: 11296 - RNA, 40 nt, synthetic construct
  source 1..40: mol_type = other RNA
ctttatttctaggtaattcccactgatttgacctgtttga

SEQ ID NO: 11297 - RNA, 41 nt, synthetic construct
  source 1..41: mol_type = other RNA
taggtgctttatttttacgtacttcaccctcggtttgagct

SEQ ID NO: 11298 - RNA, 41 nt, synthetic construct
  source 1..41: mol_type = other RNA
cagcagtaggtgctctattattaggcgctttccacttggtt

SEQ ID NO: 11299 - RNA, 41 nt, synthetic construct
  source 1..41: mol_type = other RNA
taggtgctttatttctaggtaattccccctaggtttgagct

SEQ ID NO: 11300 - RNA, 38 nt, synthetic construct
  source 1..38: mol_type = other RNA
tacttccctacttggtaaaaatttgagcggtttgagga

SEQ ID NO: 11301 - RNA, 31 nt, synthetic construct
  source 1..31: mol_type = other RNA
tttatttttaggtgtttcccaatcagtttga

SEQ ID NO: 11302 - RNA, 41 nt, synthetic construct
  source 1..41: mol_type = other RNA
ctttatttttaggtatttcccacttggtttgagctgtttga

SEQ ID NO: 11303 - RNA, 41 nt, synthetic construct
  source 1..41: mol_type = other RNA
ctttatttttaggcaattcccaattggtttgagctgtttga

SEQ ID NO: 11304 - RNA, 41 nt, synthetic construct
  source 1..41: mol_type = other RNA
ctttattttgaggtatttcccacttggattgaactgtttga

SEQ ID NO: 11305 - RNA, 41 nt, synthetic construct
  source 1..41: mol_type = other RNA
ctttatttttgggtacttcccacatggtttgagctgtttga

SEQ ID NO: 11306 - RNA, 40 nt, synthetic construct
  source 1..40: mol_type = other RNA
ctttatttctaggtatttcccacttggtatagctgtttga

SEQ ID NO: 11307 - RNA, 41 nt, synthetic construct
  source 1..41: mol_type = other RNA
cagcagtaggtgcttattttttaggtcctttccacttggtt

SEQ ID NO: 11308 - RNA, 41 nt, synthetic construct
  source 1..41: mol_type = other RNA
cagcagtaggtgctctactgttcggtagtttccacttggtt

SEQ ID NO: 11309 - RNA, 31 nt, synthetic construct
  source 1..31: mol_type = other RNA
atttttagacgcttcccccttggttcgagct

SEQ ID NO: 11310 - RNA, 41 nt, synthetic construct
  source 1..41: mol_type = other RNA
cagcagtaggtgcattacctttaggtgcttcccacttggtt

SEQ ID NO: 11311 - RNA, 31 nt, synthetic construct
  source 1..31: mol_type = other RNA
aggtgctttattttgcgggatttcccacttg

SEQ ID NO: 11312 - RNA, 41 nt, synthetic construct
  source 1..41: mol_type = other RNA
ctttatttttaggtgcttcccagctggtttgagctgtttga

SEQ ID NO: 11313 - RNA, 42 nt, synthetic construct
  source 1..42: mol_type = other RNA
taggtgctttatttaggatactgtttccaattggtttgagct

SEQ ID NO: 11314 - RNA, 41 nt, synthetic construct
  source 1..41: mol_type = other RNA
ctttatttataagtacttccgacttggtttgtgctgtttga

SEQ ID NO: 11315 - RNA, 41 nt, synthetic construct
  source 1..41: mol_type = other RNA
ctttatttttaggtcattcccacgttgtttgagctgtttga

SEQ ID NO: 11316 - RNA, 32 nt, synthetic construct
  source 1..32: mol_type = other RNA
tttaggcaattcccccttggttttgagctgtt

SEQ ID NO: 11317 - RNA, 31 nt, synthetic construct
  source 1..31: mol_type = other RNA
aggtgctttatatttaggcaattcccacttg

SEQ ID NO: 11318 - RNA, 41 nt, synthetic construct
  source 1..41: mol_type = other RNA
taggtgctttacctttaggtgcttccctcttggtttgagct

SEQ ID NO: 11319 - RNA, 43 nt, synthetic construct
  source 1..43: mol_type = other RNA
aggtacttcccacttgaaatttgcgcggtttgaggaggtggtg

SEQ ID NO: 11320 - RNA, 41 nt, synthetic construct
  source 1..41: mol_type = other RNA
ctttatttttaggtactttccacctggtttgagctgtttga

SEQ ID NO: 11321 - RNA, 41 nt, synthetic construct
  source 1..41: mol_type = other RNA
aggtacttcccacttggttagagcggtttgaggaggtggtg

SEQ ID NO: 11322 - RNA, 31 nt, synthetic construct
  source 1..31: mol_type = other RNA
aggtgccttattttgaggtatttcccacttg

SEQ ID NO: 11323 - RNA, 31 nt, synthetic construct
  source 1..31: mol_type = other RNA
tttaggtacttcccacttgctttatactgtt

SEQ ID NO: 11324 - RNA, 42 nt, synthetic construct
  source 1..42: mol_type = other RNA
ctttatttttcggtacttcccatttggtcttgagctgtttga

SEQ ID NO: 11325 - RNA, 31 nt, synthetic construct
  source 1..31: mol_type = other RNA
aggtgctttattcttaggtactttccacttg

SEQ ID NO: 11326 - RNA, 38 nt, synthetic construct
  source 1..38: mol_type = other RNA
taggtgctttattccgtagatcccacttggtttgagct

SEQ ID NO: 11327 - RNA, 42 nt, synthetic construct
  source 1..42: mol_type = other RNA
cagcagtaggtgctttatttgggataccattgccacttggtt

SEQ ID NO: 11328 - RNA, 31 nt, synthetic construct
  source 1..31: mol_type = other RNA
aggtgcttcattcctgggtacatcccacttg

SEQ ID NO: 11329 - RNA, 31 nt, synthetic construct
  source 1..31: mol_type = other RNA
tttatttttaggtacttcccacttggtttga

SEQ ID NO: 11330 - RNA, 31 nt, synthetic construct
  source 1..31: mol_type = other RNA
aggtgttttatttttaggtaactcccacttg

SEQ ID NO: 11331 - RNA, 41 nt, synthetic construct
  source 1..41: mol_type = other RNA
ctttatttttaggtctttcccacttggtttgagctgtttga

SEQ ID NO: 11332 - RNA, 41 nt, synthetic construct
  source 1..41: mol_type = other RNA
taggtgctttatttttaggcaattcccccttggtttgagct

SEQ ID NO: 11333 - RNA, 41 nt, synthetic construct
  source 1..41: mol_type = other RNA
ctttatttttagatacttcccacttggactgagctgtttga

SEQ ID NO: 11334 - RNA, 31 nt, synthetic construct
  source 1..31: mol_type = other RNA
tttatcatacggtgttttccaattggtttga

SEQ ID NO: 11335 - RNA, 41 nt, synthetic construct
  source 1..41: mol_type = other RNA
ctttatttttaggtacttcccacttgctttatactgtttga

SEQ ID NO: 11336 - RNA, 41 nt, synthetic construct
  source 1..41: mol_type = other RNA
ctttatttttaggtgtttcccaactggtttgagctgtttga

SEQ ID NO: 11337 - RNA, 31 nt, synthetic construct
  source 1..31: mol_type = other RNA
aggtgctttcattttagatacatcccacttg

SEQ ID NO: 11338 - RNA, 41 nt, synthetic construct
  source 1..41: mol_type = other RNA
ctttatttctagacagttcccactaggtttgagctgtttga

SEQ ID NO: 11339 - RNA, 41 nt, synthetic construct
  source 1..41: mol_type = other RNA
cagcagtaggtgctctgttgttaggcactttccacttggtt

SEQ ID NO: 11340 - RNA, 42 nt, synthetic construct
  source 1..42: mol_type = other RNA
taggtgctggtatttttcacgtattcccacttggtttgagct

SEQ ID NO: 11341 - RNA, 41 nt, synthetic construct
  source 1..41: mol_type = other RNA
ttttaggtacttcccacttggtttgagcggtttgaggaggt

SEQ ID NO: 11342 - RNA, 41 nt, synthetic construct
  source 1..41: mol_type = other RNA
ctttatttttgggtttgtcccacttggtttgagctgtttga

SEQ ID NO: 11343 - RNA, 40 nt, synthetic construct
  source 1..40: mol_type = other RNA
aggtacttcccaattggtttgagcggtttgagaggtggtg

SEQ ID NO: 11344 - RNA, 41 nt, synthetic construct
  source 1..41: mol_type = other RNA
taggtgctctattattaggcactttccactcggtttgagct

SEQ ID NO: 11345 - RNA, 32 nt, synthetic construct
  source 1..32: mol_type = other RNA
aggtgttttattgttaaggcacttccgacttg

SEQ ID NO: 11346 - RNA, 50 nt, synthetic construct
  source 1..50: mol_type = other RNA
aggtgcttttttttgggtccatacaccacccccaccccaccccccacttg

SEQ ID NO: 11347 - RNA, 31 nt, synthetic construct
  source 1..31: mol_type = other RNA
aggtgctttatttttagtaactttccacttg

SEQ ID NO: 11348 - RNA, 41 nt, synthetic construct
  source 1..41: mol_type = other RNA
cagcagtaggggctctattattagataactccaacttggtt

SEQ ID NO: 11349 - RNA, 39 nt, synthetic construct
  source 1..39: mol_type = other RNA
cagcagtaggctttattttgcgggatttcccacttggtt

SEQ ID NO: 11350 - RNA, 41 nt, synthetic construct
  source 1..41: mol_type = other RNA
cagcagtaggtgctttatacttgggtactttccacttggtt

SEQ ID NO: 11351 - RNA, 45 nt, synthetic construct
  source 1..45: mol_type = other RNA
tttaggcgcttcccacacacacacacacttcgttgttgagctgtt

SEQ ID NO: 11352 - RNA, 31 nt, synthetic construct
  source 1..31: mol_type = other RNA
tttatttttaggtgcttccgaattggtttga

SEQ ID NO: 11353 - RNA, 31 nt, synthetic construct
  source 1..31: mol_type = other RNA
aggtgcttttttgttaggtacttcccacttg

SEQ ID NO: 11354 - RNA, 31 nt, synthetic construct
  source 1..31: mol_type = other RNA
aggtgctctatccttaggtacctcccacttg

SEQ ID NO: 11355 - RNA, 41 nt, synthetic construct
  source 1..41: mol_type = other RNA
aggtacttcccacttggtttgagcggttcgaggaggtggtg

SEQ ID NO: 11356 - RNA, 41 nt, synthetic construct
  source 1..41: mol_type = other RNA
cagcagtaggggttttattccgaggtgttacccacttggtt

SEQ ID NO: 11357 - RNA, 30 nt, synthetic construct
  source 1..30: mol_type = other RNA
aggtgctttattttaggtacttcccacttg

SEQ ID NO: 11358 - RNA, 30 nt, synthetic construct
  source 1..30: mol_type = other RNA
tttaggtattcccacttggactgagctgtt

SEQ ID NO: 11359 - RNA, 41 nt, synthetic construct
  source 1..41: mol_type = other RNA
aggtacttcccacttagtttgggcgttttgaggaggtggtg

SEQ ID NO: 11360 - RNA, 38 nt, synthetic construct
  source 1..38: mol_type = other RNA
cagcagtaggggttttattccgtagatcccacttggtt

SEQ ID NO: 11361 - RNA, 41 nt, synthetic construct
  source 1..41: mol_type = other RNA
ctttattttcaggtacttcccacttggttagagctgtttga

SEQ ID NO: 11362 - RNA, 41 nt, synthetic construct
  source 1..41: mol_type = other RNA
ctttatttttacgtacttcccgcttggtttgtactgtttga

SEQ ID NO: 11363 - RNA, 41 nt, synthetic construct
  source 1..41: mol_type = other RNA
ctttatttaggatactgtttccaattggttgagctgtttga

SEQ ID NO: 11364 - RNA, 42 nt, synthetic construct
  source 1..42: mol_type = other RNA
cagcagtaggtgctttatttttacgtacttcaccacttggtt

SEQ ID NO: 11365 - RNA, 41 nt, synthetic construct
  source 1..41: mol_type = other RNA
ctttatttttaggcgctttccacttggttcaagctgtttga

SEQ ID NO: 11366 - RNA, 55 nt, synthetic construct
  source 1..55: mol_type = other RNA
taggtgctttatcttcgagggtctacttccgcactccagcttggtggtttgagct

SEQ ID NO: 11367 - RNA, 41 nt, synthetic construct
  source 1..41: mol_type = other RNA
ttttaggtacttcccacatggtttgagcggtttgaggaggt

SEQ ID NO: 11368 - RNA, 40 nt, synthetic construct
  source 1..40: mol_type = other RNA
taggtgcttatttgtgggtattttccacttggtttgagct

SEQ ID NO: 11369 - RNA, 41 nt, synthetic construct
  source 1..41: mol_type = other RNA
taggtgctttatatttgggtatttccctcctggtttgagct

SEQ ID NO: 11370 - RNA, 31 nt, synthetic construct
  source 1..31: mol_type = other RNA
aggtgctttattctttgggatttcccacttg

SEQ ID NO: 11371 - RNA, 31 nt, synthetic construct
  source 1..31: mol_type = other RNA
tttagatgcttcccactaggtttgagctgtt

SEQ ID NO: 11372 - RNA, 31 nt, synthetic construct
  source 1..31: mol_type = other RNA
aggtgctttatttttaggtgcttcctacttg

SEQ ID NO: 11373 - RNA, 31 nt, synthetic construct
  source 1..31: mol_type = other RNA
tacttcccaactggtttgagtggtttgagga

SEQ ID NO: 11374 - RNA, 40 nt, synthetic construct
  source 1..40: mol_type = other RNA
aggtacttcccacttggtatagcggtttggagaggtggtg

SEQ ID NO: 11375 - RNA, 40 nt, synthetic construct
  source 1..40: mol_type = other RNA
cagcagtaggtgcttatttgtgggtattttccacttggtt

SEQ ID NO: 11376 - RNA, 41 nt, synthetic construct
  source 1..41: mol_type = other RNA
ctttattttgcgggatttcccacttggtttgagctgtttga

SEQ ID NO: 11377 - RNA, 31 nt, synthetic construct
  source 1..31: mol_type = other RNA
tacttcccgcttggctcgagcggtttgagga

SEQ ID NO: 11378 - RNA, 41 nt, synthetic construct
  source 1..41: mol_type = other RNA
cagcagtaggtgctttatttttcggtactttctacttggtt

SEQ ID NO: 11379 - RNA, 49 nt, synthetic construct
  source 1..49: mol_type = other RNA
aggtacttcccacttggttctcctgcttgagcgttttgaggaggtggtg

SEQ ID NO: 11380 - RNA, 40 nt, synthetic construct
  source 1..40: mol_type = other RNA
aggtacttcccctttgtttgtggggtttgaggaggtggtg

SEQ ID NO: 11381 - RNA, 43 nt, synthetic construct
  source 1..43: mol_type = other RNA
taggtgctttatttttaggtattttcccggcatggtttgagct

SEQ ID NO: 11382 - RNA, 41 nt, synthetic construct
  source 1..41: mol_type = other RNA
taggtgctcgatttttaggtacttcccccttggtttgagct

SEQ ID NO: 11383 - RNA, 31 nt, synthetic construct
  source 1..31: mol_type = other RNA
aggtgcttggttttcaggtacttcccacttg

SEQ ID NO: 11384 - RNA, 35 nt, synthetic construct
  source 1..35: mol_type = other RNA
tacttcccacttaaacaatttgagcggtctgagga

SEQ ID NO: 11385 - RNA, 31 nt, synthetic construct
  source 1..31: mol_type = other RNA
tttatttttaagtacttcccacttggtttga

SEQ ID NO: 11386 - RNA, 31 nt, synthetic construct
  source 1..31: mol_type = other RNA
aggtgctttattattaggtattttccacttg

SEQ ID NO: 11387 - RNA, 55 nt, synthetic construct
  source 1..55: mol_type = other RNA
taggtgctttattttgttaggtactgtgagctatgaccagggtcctgtttgagct

SEQ ID NO: 11388 - RNA, 43 nt, synthetic construct
  source 1..43: mol_type = other RNA
atttttaggcgcttcccacacacacacacacttcgttggagct

SEQ ID NO: 11389 - RNA, 41 nt, synthetic construct
  source 1..41: mol_type = other RNA
aggtacttcccacatggtttgagcggtttgaggaggtggtg

SEQ ID NO: 11390 - RNA, 31 nt, synthetic construct
  source 1..31: mol_type = other RNA
aggtgctttttttttaggtgtttcccacttg

SEQ ID NO: 11391 - RNA, 41 nt, synthetic construct
  source 1..41: mol_type = other RNA
ctttatttctaggtacttcccacttggtatgagctgtttga

SEQ ID NO: 11392 - RNA, 41 nt, synthetic construct
  source 1..41: mol_type = other RNA
cagcagtaggtgcttttttattaggtactttccacttggtt

SEQ ID NO: 11393 - RNA, 41 nt, synthetic construct
  source 1..41: mol_type = other RNA
aggtacttcccacttggtttgaggggtttgaggaggtggtg

SEQ ID NO: 11394 - RNA, 31 nt, synthetic construct
  source 1..31: mol_type = other RNA
atttttaagtacttcccacttggtttgagct

SEQ ID NO: 11395 - RNA, 38 nt, synthetic construct
  source 1..38: mol_type = other RNA
ctttatttttaggtaattcccacttggttcctgtttga

SEQ ID NO: 11396 - RNA, 31 nt, synthetic construct
  source 1..31: mol_type = other RNA
atttttaggtacttcccactaggtttgagct

SEQ ID NO: 11397 - RNA, 41 nt, synthetic construct
  source 1..41: mol_type = other RNA
ctttatttttaggtacttcccactaggtttatactgtttga

SEQ ID NO: 11398 - RNA, 41 nt, synthetic construct
  source 1..41: mol_type = other RNA
ttttaggtgctttccacttggttcaagtggtttgaggaggt

SEQ ID NO: 11399 - RNA, 31 nt, synthetic construct
  source 1..31: mol_type = other RNA
aggtgctctatcgttagagcattcccacttg

SEQ ID NO: 11400 - RNA, 41 nt, synthetic construct
  source 1..41: mol_type = other RNA
ctttatttttaggtacttcccacttggtttgagctgtttga

SEQ ID NO: 11401 - RNA, 41 nt, synthetic construct
  source 1..41: mol_type = other RNA
aggtacttccaacttggtttgagcggtttgcggaggtggtg

SEQ ID NO: 11402 - RNA, 31 nt, synthetic construct
  source 1..31: mol_type = other RNA
aggtgatttatttttagacgcttccgacttg

SEQ ID NO: 11403 - RNA, 41 nt, synthetic construct
  source 1..41: mol_type = other RNA
ctttatttttaggtgtttcccaatcagtttcagctgtttga

SEQ ID NO: 11404 - RNA, 31 nt, synthetic construct
  source 1..31: mol_type = other RNA
aggtgcattatttttagatacttcccacttg

SEQ ID NO: 11405 - RNA, 45 nt, synthetic construct
  source 1..45: mol_type = other RNA
ctttatttttagccacttcccacttaaacaatttgagctgtttga

SEQ ID NO: 11406 - RNA, 47 nt, synthetic construct
  source 1..47: mol_type = other RNA
cagcagtaacctcccgtgttttatatttgggtatttcccacttggtt

SEQ ID NO: 11407 - RNA, 42 nt, synthetic construct
  source 1..42: mol_type = other RNA
taggtgctttatttgtcggtacgtttccaagcaatttgagct

SEQ ID NO: 11408 - RNA, 41 nt, synthetic construct
  source 1..41: mol_type = other RNA
aggtacttcccacttggtttgagcggtttgcggaggtggtg

SEQ ID NO: 11409 - RNA, 31 nt, synthetic construct
  source 1..31: mol_type = other RNA
tacttcccacttggtttgagtggtttgagga

SEQ ID NO: 11410 - RNA, 41 nt, synthetic construct
  source 1..41: mol_type = other RNA
ctttatttttaggtacttcccacttggtctgagctgtttga

SEQ ID NO: 11411 - RNA, 39 nt, synthetic construct
  source 1..39: mol_type = other RNA
ctttatttttaggtttcccacttggtttgagctgtttga

SEQ ID NO: 11412 - RNA, 31 nt, synthetic construct
  source 1..31: mol_type = other RNA
aggtgccttttttttaggtgtttcccacttg

SEQ ID NO: 11413 - RNA, 42 nt, synthetic construct
  source 1..42: mol_type = other RNA
ctttatttttaggtactatccaattggttcctagctgtttga

SEQ ID NO: 11414 - RNA, 31 nt, synthetic construct
  source 1..31: mol_type = other RNA
aggtgctctatcatacggtgttttccacttg

SEQ ID NO: 11415 - RNA, 41 nt, synthetic construct
  source 1..41: mol_type = other RNA
cagcagtaagtgctttattattaggtattttccacttggtt

SEQ ID NO: 11416 - RNA, 31 nt, synthetic construct
  source 1..31: mol_type = other RNA
tttaggtatttcccacttgtaatgagctgtt

SEQ ID NO: 11417 - RNA, 42 nt, synthetic construct
  source 1..42: mol_type = other RNA
cagcagtaggttaaggtatttttcacgtattcccacttggtt

SEQ ID NO: 11418 - RNA, 31 nt, synthetic construct
  source 1..31: mol_type = other RNA
atttttcggtagtttccacttcgtttgagct

SEQ ID NO: 11419 - RNA, 30 nt, synthetic construct
  source 1..30: mol_type = other RNA
atttttaggtaattcccactgatttgagct

SEQ ID NO: 11420 - RNA, 40 nt, synthetic construct
  source 1..40: mol_type = other RNA
ttttaggtgtttcccctttgtttgtggggtttgaggaggt

SEQ ID NO: 11421 - RNA, 41 nt, synthetic construct
  source 1..41: mol_type = other RNA
ctttatttttaggtatcttccacttggtttgagctgtttga

SEQ ID NO: 11422 - RNA, 41 nt, synthetic construct
  source 1..41: mol_type = other RNA
ctttatttctaggtaattccccctaggtttgagctgtttga

SEQ ID NO: 11423 - RNA, 41 nt, synthetic construct
  source 1..41: mol_type = other RNA
aggtacttcccacttggtttgagaggtttgaggaggtggtg

SEQ ID NO: 11424 - RNA, 41 nt, synthetic construct
  source 1..41: mol_type = other RNA
ttttaggtgcttccctcctggtttgaccggtttgaggaggt

SEQ ID NO: 11425 - RNA, 41 nt, synthetic construct
  source 1..41: mol_type = other RNA
cagcagtagctgcttggttttcaggtacttcccacttggtt

SEQ ID NO: 11426 - RNA, 31 nt, synthetic construct
  source 1..31: mol_type = other RNA
tttaggtcctttccaacttgtttgagctgtt

SEQ ID NO: 11427 - RNA, 31 nt, synthetic construct
  source 1..31: mol_type = other RNA
tactttccactggatttgagtggtttgagga

SEQ ID NO: 11428 - RNA, 41 nt, synthetic construct
  source 1..41: mol_type = other RNA
aggtacttcccgcttggtttgtacggtttacggaggtggtg

SEQ ID NO: 11429 - RNA, 42 nt, synthetic construct
  source 1..42: mol_type = other RNA
cagcagtaggtgctttatttgttggtacgtttccacttggtt

SEQ ID NO: 11430 - RNA, 40 nt, synthetic construct
  source 1..40: mol_type = other RNA
aggtactttccaattggttgagcggtttgaggaggtggtg

SEQ ID NO: 11431 - RNA, 41 nt, synthetic construct
  source 1..41: mol_type = other RNA
ctttatttttcacgtattcccacttggactgagctgtttga

SEQ ID NO: 11432 - RNA, 41 nt, synthetic construct
  source 1..41: mol_type = other RNA
cagcagtaagtgcatttgagttaggtattttccacttggtt

SEQ ID NO: 11433 - RNA, 41 nt, synthetic construct
  source 1..41: mol_type = other RNA
ctttatttctaggtacttcccacttggtttgagctgtttga

SEQ ID NO: 11434 - RNA, 31 nt, synthetic construct
  source 1..31: mol_type = other RNA
tttatttttgggtacttcccacatggtttga

SEQ ID NO: 11435 - RNA, 43 nt, synthetic construct
  source 1..43: mol_type = other RNA
ctttatttttaggtattttcccggcatggtttggactgtttga

SEQ ID NO: 11436 - RNA, 31 nt, synthetic construct
  source 1..31: mol_type = other RNA
aggtgatttatttttgggtaaatcccacttg

SEQ ID NO: 11437 - RNA, 41 nt, synthetic construct
  source 1..41: mol_type = other RNA
ttttaggtgcttcctacggggtttgagtgccttgaggaggt

SEQ ID NO: 11438 - RNA, 41 nt, synthetic construct
  source 1..41: mol_type = other RNA
ctttatttttaggtaattccccctaggtttgagctgtttga

SEQ ID NO: 11439 - RNA, 31 nt, synthetic construct
  source 1..31: mol_type = other RNA
aggtgcttttttattaggtcattcccacttg

SEQ ID NO: 11440 - RNA, 32 nt, synthetic construct
  source 1..32: mol_type = other RNA
aggtgctttatttggcggtacttttccacttg

SEQ ID NO: 11441 - RNA, 31 nt, synthetic construct
  source 1..31: mol_type = other RNA
aggtgcattacctttaggtgcttcccacttg

SEQ ID NO: 11442 - RNA, 42 nt, synthetic construct
  source 1..42: mol_type = other RNA
ctttatttttgggatttcccacttgaaatttgcgctgtttga

SEQ ID NO: 11443 - RNA, 42 nt, synthetic construct
  source 1..42: mol_type = other RNA
cagcagtaggtgctttatttgtcggtacgtttccacttggtt

SEQ ID NO: 11444 - RNA, 41 nt, synthetic construct
  source 1..41: mol_type = other RNA
ctttatttttggtaacttcccactaggtttgagctgtttga

SEQ ID NO: 11445 - RNA, 31 nt, synthetic construct
  source 1..31: mol_type = other RNA
tttaggtactttcctattgggttgagctgtt

SEQ ID NO: 11446 - RNA, 31 nt, synthetic construct
  source 1..31: mol_type = other RNA
tttaggtacttcccacttggtttgagctgtt

SEQ ID NO: 11447 - RNA, 31 nt, synthetic construct
  source 1..31: mol_type = other RNA
aggtgctttattgctagacagttcccacttg

SEQ ID NO: 11448 - RNA, 41 nt, synthetic construct
  source 1..41: mol_type = other RNA
ttttaggtatttcccacttggtttgaggggtttgaggaggt

SEQ ID NO: 11449 - RNA, 41 nt, synthetic construct
  source 1..41: mol_type = other RNA
ctttatttttaggtgttttccacttggtttgagctgtttga

SEQ ID NO: 11450 - RNA, 41 nt, synthetic construct
  source 1..41: mol_type = other RNA
aggtacttcccacctggtttgagcggtttgaggaggtggtg

SEQ ID NO: 11451 - RNA, 41 nt, synthetic construct
  source 1..41: mol_type = other RNA
ttttaggtatttcccacttggtttgagcgattggaggaggt

SEQ ID NO: 11452 - RNA, 31 nt, synthetic construct
  source 1..31: mol_type = other RNA
aggtgttttatatttgggtatttcccacttg

SEQ ID NO: 11453 - RNA, 41 nt, synthetic construct
  source 1..41: mol_type = other RNA
ctttatttataggtatttcccacttgtaatgagctgtttga

SEQ ID NO: 11454 - RNA, 41 nt, synthetic construct
  source 1..41: mol_type = other RNA
taggtgctttatttttcggtactttctgtttggtttgagct

SEQ ID NO: 11455 - RNA, 31 nt, synthetic construct
  source 1..31: mol_type = other RNA
tttatttataggtaattccgacttggtttga

SEQ ID NO: 11456 - RNA, 32 nt, synthetic construct
  source 1..32: mol_type = other RNA
aggtgctttatttgggataccattgccacttg

SEQ ID NO: 11457 - RNA, 30 nt, synthetic construct
  source 1..30: mol_type = other RNA
tttaggttactcccgacttcttgagctgtt

SEQ ID NO: 11458 - RNA, 31 nt, synthetic construct
  source 1..31: mol_type = other RNA
aggtgccttgtttatagttactcccgacttg

SEQ ID NO: 11459 - RNA, 60 nt, synthetic construct
  source 1..60: mol_type = other RNA
cagcagtaggtgcttttttttgggtccatacaccacccccaccccaccccccacttggtt

SEQ ID NO: 11460 - RNA, 36 nt, synthetic construct
  source 1..36: mol_type = other RNA
tacttcccaacttggtctcccgcagcggtatgagga

SEQ ID NO: 11461 - RNA, 46 nt, synthetic construct
  source 1..46: mol_type = other RNA
ctttatttttaggtaactcccaaacttggtttcagtagctgtttga

SEQ ID NO: 11462 - RNA, 43 nt, synthetic construct
  source 1..43: mol_type = other RNA
aggtactttcccggcatggtttggatggtttgaggaggtggtg

SEQ ID NO: 11463 - RNA, 32 nt, synthetic construct
  source 1..32: mol_type = other RNA
tacttcccacctgactttgagcggtttgagga

SEQ ID NO: 11464 - RNA, 41 nt, synthetic construct
  source 1..41: mol_type = other RNA
ttttaggtccttcccccttggtgtgagcggtttgaggaggt

SEQ ID NO: 11465 - RNA, 41 nt, synthetic construct
  source 1..41: mol_type = other RNA
ctttatttttcggtcctttcgacttggtttgagctgtttga

SEQ ID NO: 11466 - RNA, 43 nt, synthetic construct
  source 1..43: mol_type = other RNA
cagcagtaggcaggctttatttttaggtatttcccacttggtt

SEQ ID NO: 11467 - RNA, 31 nt, synthetic construct
  source 1..31: mol_type = other RNA
tttaggtacctcccacttggtttgggctgtt

SEQ ID NO: 11468 - RNA, 41 nt, synthetic construct
  source 1..41: mol_type = other RNA
cagcagtaggtaatttgtttttaagtacttcccacttggtt

SEQ ID NO: 11469 - RNA, 40 nt, synthetic construct
  source 1..40: mol_type = other RNA
ctttatttttaggtattttccacttggttggactgtttga

SEQ ID NO: 11470 - RNA, 41 nt, synthetic construct
  source 1..41: mol_type = other RNA
ctttatttttaggtgcttccctcttggtttgagctgtttga

SEQ ID NO: 11471 - RNA, 41 nt, synthetic construct
  source 1..41: mol_type = other RNA
ttttaggtgtttcccacttggtttgagtggtttgaggaggt

SEQ ID NO: 11472 - RNA, 31 nt, synthetic construct
  source 1..31: mol_type = other RNA
atttttcacgtattcccacttggactgagct

SEQ ID NO: 11473 - RNA, 41 nt, synthetic construct
  source 1..41: mol_type = other RNA
aggtactttccacttcgtttgagtggtttgaggaggtggtg

SEQ ID NO: 11474 - RNA, 31 nt, synthetic construct
  source 1..31: mol_type = other RNA
aggtgctttgtctttggtaacttcccacttg

SEQ ID NO: 11475 - RNA, 42 nt, synthetic construct
  source 1..42: mol_type = other RNA
ttttaggtaacttcccactaggtttgagaggtttgaggaggt

SEQ ID NO: 11476 - RNA, 32 nt, synthetic construct
  source 1..32: mol_type = other RNA
tttagataccattgccgattggttgagctgtt

SEQ ID NO: 11477 - RNA, 42 nt, synthetic construct
  source 1..42: mol_type = other RNA
taggtgctttatttgggataccattgccgattggtttgagct

SEQ ID NO: 11478 - RNA, 49 nt, synthetic construct
  source 1..49: mol_type = other RNA
ttttaggtcattcccacttggttctcctgcttgagcgttttgaggaggt

SEQ ID NO: 11479 - RNA, 40 nt, synthetic construct
  source 1..40: mol_type = other RNA
ttttaggtaattcccactgatttgaccggtttgaggaggt

SEQ ID NO: 11480 - RNA, 31 nt, synthetic construct
  source 1..31: mol_type = other RNA
tttatccttaggtacttcccacttggtttga

SEQ ID NO: 11481 - RNA, 41 nt, synthetic construct
  source 1..41: mol_type = other RNA
aggtacttcccagctggtttgagcggtttgaggaggtggtg

SEQ ID NO: 11482 - RNA, 42 nt, synthetic construct
  source 1..42: mol_type = other RNA
ctttatttttaggcaattcccccttggttttgagctgtttga

SEQ ID NO: 11483 - RNA, 31 nt, synthetic construct
  source 1..31: mol_type = other RNA
atttttcggtcctttcgacttggtttgagct

SEQ ID NO: 11484 - RNA, 31 nt, synthetic construct
  source 1..31: mol_type = other RNA
tttatttttaggtactatccaattggtttga

SEQ ID NO: 11485 - RNA, 31 nt, synthetic construct
  source 1..31: mol_type = other RNA
tacttcccacttggttagagcggtttgagga

SEQ ID NO: 11486 - RNA, 31 nt, synthetic construct
  source 1..31: mol_type = other RNA
aggtgatttgtttttaagtacttcccacttg

SEQ ID NO: 11487 - RNA, 41 nt, synthetic construct
  source 1..41: mol_type = other RNA
cagcagtaggtgctttattcttaggtatcttccacttggtt

SEQ ID NO: 11488 - RNA, 41 nt, synthetic construct
  source 1..41: mol_type = other RNA
aggtactttctacttagtttgagtggtttgaggaggtggtg

SEQ ID NO: 11489 - RNA, 41 nt, synthetic construct
  source 1..41: mol_type = other RNA
ttttaggtattttccactggatttgagtggtttgaggaggt

SEQ ID NO: 11490 - RNA, 41 nt, synthetic construct
  source 1..41: mol_type = other RNA
ttttaggtacttcccacctggtttgagcggtttgaggaggt

SEQ ID NO: 11491 - RNA, 31 nt, synthetic construct
  source 1..31: mol_type = other RNA
attttgaggtgttacccacttcgtttgagct

SEQ ID NO: 11492 - RNA, 45 nt, synthetic construct
  source 1..45: mol_type = other RNA
ctttatttataggtacttgccacaggaaaggtttgagctgtttga

SEQ ID NO: 11493 - RNA, 31 nt, synthetic construct
  source 1..31: mol_type = other RNA
tttagggatttcccacttggtttgagctgtt

SEQ ID NO: 11494 - RNA, 31 nt, synthetic construct
  source 1..31: mol_type = other RNA
aggtgctttatttttcggtactttctacttg

SEQ ID NO: 11495 - RNA, 31 nt, synthetic construct
  source 1..31: mol_type = other RNA
tttaggtattttccaattcgtttgaactgtt

SEQ ID NO: 11496 - RNA, 30 nt, synthetic construct
  source 1..30: mol_type = other RNA
tactttccaggccattgagcggtttgagga

SEQ ID NO: 11497 - RNA, 41 nt, synthetic construct
  source 1..41: mol_type = other RNA
ctttatttttaggcactttccactcggttcgagctgtttga

SEQ ID NO: 11498 - RNA, 31 nt, synthetic construct
  source 1..31: mol_type = other RNA
tttagtaacttcccactaggtttgagctgtt

SEQ ID NO: 11499 - RNA, 41 nt, synthetic construct
  source 1..41: mol_type = other RNA
taggtgctttatacttgggtactttcctattggtttgagct

SEQ ID NO: 11500 - RNA, 31 nt, synthetic construct
  source 1..31: mol_type = other RNA
tttaggtagtttccacttcgtttgagctgtt

SEQ ID NO: 11501 - RNA, 38 nt, synthetic construct
  source 1..38: mol_type = other RNA
aggtacttcccacttggtttgagcggtttgaggtggtg

SEQ ID NO: 11502 - RNA, 46 nt, synthetic construct
  source 1..46: mol_type = other RNA
aggtacttcccaacttggtctcccgcagcggtatgaggaggtggtg

SEQ ID NO: 11503 - RNA, 31 nt, synthetic construct
  source 1..31: mol_type = other RNA
tacttcccacatggtttgagcggtttgagga

SEQ ID NO: 11504 - RNA, 31 nt, synthetic construct
  source 1..31: mol_type = other RNA
atttttaggtgcttccgaattggtttgagct

SEQ ID NO: 11505 - RNA, 41 nt, synthetic construct
  source 1..41: mol_type = other RNA
ctttatttttaggtacttcccccttggttagagctgtttga

SEQ ID NO: 11506 - RNA, 41 nt, synthetic construct
  source 1..41: mol_type = other RNA
ctttatttttaggtgcttcctacggggtttgagctgtttga

SEQ ID NO: 11507 - RNA, 31 nt, synthetic construct
  source 1..31: mol_type = other RNA
tacttccgactaggttcgagcggtttgagga

SEQ ID NO: 11508 - RNA, 31 nt, synthetic construct
  source 1..31: mol_type = other RNA
tacttcccccttggttcgaggggtttgagga

SEQ ID NO: 11509 - RNA, 41 nt, synthetic construct
  source 1..41: mol_type = other RNA
aggtacttcccccttggtgtgagcggtttgaggaggtggtg

SEQ ID NO: 11510 - RNA, 31 nt, synthetic construct
  source 1..31: mol_type = other RNA
tttaggtcctttcgacttggtttgagctgtt

SEQ ID NO: 11511 - RNA, 41 nt, synthetic construct
  source 1..41: mol_type = other RNA
ctttatttttaggtgcttccctcctggtttgacctgtttga

SEQ ID NO: 11512 - RNA, 31 nt, synthetic construct
  source 1..31: mol_type = other RNA
tttatttttaggtgcttccctcctggtttga

SEQ ID NO: 11513 - RNA, 46 nt, synthetic construct
  source 1..46: mol_type = other RNA
cagcagtagcagttgtgctgtatttttaggtacttcccacttggtt

SEQ ID NO: 11514 - RNA, 42 nt, synthetic construct
  source 1..42: mol_type = other RNA
ctttattttagaacacaactccacttggattgagctgtttga

SEQ ID NO: 11515 - RNA, 41 nt, synthetic construct
  source 1..41: mol_type = other RNA
ctttatttttaggtcctttccaacttgtttgagctgtttga

SEQ ID NO: 11516 - RNA, 41 nt, synthetic construct
  source 1..41: mol_type = other RNA
ctttatttcgaggtgttacccacttcgtttgagctgtttga

SEQ ID NO: 11517 - RNA, 41 nt, synthetic construct
  source 1..41: mol_type = other RNA
ctttatttttgggtatttccctcctggtttgagctgtttga

SEQ ID NO: 11518 - RNA, 31 nt, synthetic construct
  source 1..31: mol_type = other RNA
aggtgcgttattcataggtatttcccacttg

SEQ ID NO: 11519 - RNA, 31 nt, synthetic construct
  source 1..31: mol_type = other RNA
tttaggtacgtttccaattggttgagctgtt

SEQ ID NO: 11520 - RNA, 32 nt, synthetic construct
  source 1..32: mol_type = other RNA
atttttgggatttcccacttgaaatttgagct

SEQ ID NO: 11521 - RNA, 30 nt, synthetic construct
  source 1..30: mol_type = other RNA
tactttccaattggttgagcggtttgagga

SEQ ID NO: 11522 - RNA, 32 nt, synthetic construct
  source 1..32: mol_type = other RNA
tactttcatacttggtacatcgggtttgagga

SEQ ID NO: 11523 - RNA, 31 nt, synthetic construct
  source 1..31: mol_type = other RNA
aggtgctctattattaggcgctttccacttg

SEQ ID NO: 11524 - RNA, 41 nt, synthetic construct
  source 1..41: mol_type = other RNA
aggtacttccccctaggtttgagcggtttgaggaggtggtg

SEQ ID NO: 11525 - RNA, 41 nt, synthetic construct
  source 1..41: mol_type = other RNA
ctttatttttaggtattttccaattcgtttgaactgtttga

SEQ ID NO: 11526 - RNA, 31 nt, synthetic construct
  source 1..31: mol_type = other RNA
tttatttataagtacttccgacttggtttga

SEQ ID NO: 11527 - RNA, 42 nt, synthetic construct
  source 1..42: mol_type = other RNA
taggtgctttttttggcggtacgtttccaggccatttgagct

SEQ ID NO: 11528 - RNA, 31 nt, synthetic construct
  source 1..31: mol_type = other RNA
aggtgctctattattaggcactttccacttg

SEQ ID NO: 11529 - RNA, 41 nt, synthetic construct
  source 1..41: mol_type = other RNA
aggtacttcccactaggtttgagaggtttgaggaggtggtg

SEQ ID NO: 11530 - RNA, 30 nt, synthetic construct
  source 1..30: mol_type = other RNA
tacttcccactgatttgaccggtttgagga

SEQ ID NO: 11531 - RNA, 61 nt, synthetic construct
  source 1..61: mol_type = other RNA
tacttccgcactccagcttggtggttagagggagatgagcggtcaaaaaaaaatttgagga

SEQ ID NO: 11532 - RNA, 31 nt, synthetic construct
  source 1..31: mol_type = other RNA
atttttgggtaaatcccacttggtttgagct

SEQ ID NO: 11533 - RNA, 42 nt, synthetic construct
  source 1..42: mol_type = other RNA
aggtacttcccacctgactttgagcggtttggggaggtggtg

SEQ ID NO: 11534 - RNA, 42 nt, synthetic construct
  source 1..42: mol_type = other RNA
aggtacttccgactaggttcgagcggtttgagcgaggtggtg

SEQ ID NO: 11535 - RNA, 31 nt, synthetic construct
  source 1..31: mol_type = other RNA
tttattgctagacagttcccactaggtttga

SEQ ID NO: 11536 - RNA, 41 nt, synthetic construct
  source 1..41: mol_type = other RNA
ctttatttttaggtccttcccccttggtgtgagctgtttga

SEQ ID NO: 11537 - RNA, 31 nt, synthetic construct
  source 1..31: mol_type = other RNA
tacttcccccttggtgtgagcggtttgagga

SEQ ID NO: 11538 - RNA, 31 nt, synthetic construct
  source 1..31: mol_type = other RNA
tttaggtacttcccacttggtatgagctgtt

SEQ ID NO: 11539 - RNA, 31 nt, synthetic construct
  source 1..31: mol_type = other RNA
atttttaggtatttcccacttggtatgagct

SEQ ID NO: 11540 - RNA, 41 nt, synthetic construct
  source 1..41: mol_type = other RNA
ctttatttttaggtactttccacttggtttgagctgtttga

SEQ ID NO: 11541 - RNA, 29 nt, synthetic construct
  source 1..29: mol_type = other RNA
aggtgctttatttaggtatttcccacttg

SEQ ID NO: 11542 - RNA, 41 nt, synthetic construct
  source 1..41: mol_type = other RNA
ttttaggtatttcccacttggtttgagcggtttgaggaggt

SEQ ID NO: 11543 - RNA, 41 nt, synthetic construct
  source 1..41: mol_type = other RNA
cagcagtaggtgcttcatttttaggtactatccacttggtt

SEQ ID NO: 11544 - RNA, 41 nt, synthetic construct
  source 1..41: mol_type = other RNA
ttttaggtaattcccaattggtttgagcggtttgaggaggt

SEQ ID NO: 11545 - RNA, 31 nt, synthetic construct
  source 1..31: mol_type = other RNA
tttatatttaggcaattcccaattggtttga

SEQ ID NO: 11546 - RNA, 31 nt, synthetic construct
  source 1..31: mol_type = other RNA
tttattattaggtcattcccacgttgtttga

SEQ ID NO: 11547 - RNA, 31 nt, synthetic construct
  source 1..31: mol_type = other RNA
tttaggtacttttccaattggttgagctgtt

SEQ ID NO: 11548 - RNA, 31 nt, synthetic construct
  source 1..31: mol_type = other RNA
aggtgttttattccgaggtgttacccacttg

SEQ ID NO: 11549 - RNA, 52 nt, synthetic construct
  source 1..52: mol_type = other RNA
aggtacttcccacttgcattgagcgccaaatcttggttctggggaggtggtg

SEQ ID NO: 11550 - RNA, 32 nt, synthetic construct
  source 1..32: mol_type = other RNA
aggtgcttgatttttagggaattttcaacttg

SEQ ID NO: 11551 - RNA, 32 nt, synthetic construct
  source 1..32: mol_type = other RNA
aggtgctttatttgtcggtacgtttccacttg

SEQ ID NO: 11552 - RNA, 49 nt, synthetic construct
  source 1..49: mol_type = other RNA
ctttatttttagagcattcccacttggttctcctgcttgagctgtttga

SEQ ID NO: 11553 - RNA, 40 nt, synthetic construct
  source 1..40: mol_type = other RNA
aggtacttcccactgatttgaccggtttgggaaggtggtg

SEQ ID NO: 11554 - RNA, 48 nt, synthetic construct
  source 1..48: mol_type = other RNA
cagcagtaggtgcgctttatcttcgagggtctacttccgcacttggtt

SEQ ID NO: 11555 - RNA, 32 nt, synthetic construct
  source 1..32: mol_type = other RNA
tttatttttaggtacttcccaacttggtttga

SEQ ID NO: 11556 - RNA, 31 nt, synthetic construct
  source 1..31: mol_type = other RNA
atttttaggtgtttcccacttagtttgagct

SEQ ID NO: 11557 - RNA, 31 nt, synthetic construct
  source 1..31: mol_type = other RNA
atttttaggtacttcccacttggtttgagct

SEQ ID NO: 11558 - RNA, 41 nt, synthetic construct
  source 1..41: mol_type = other RNA
ttttaggtacttcccacttgctttatacggtttgaggaggt

SEQ ID NO: 11559 - RNA, 31 nt, synthetic construct
  source 1..31: mol_type = other RNA
atttttgggtacttcccacatggtttgagct

SEQ ID NO: 11560 - RNA, 33 nt, synthetic construct
  source 1..33: mol_type = other RNA
atttttaggtaactcccaaacttggtttgagct

SEQ ID NO: 11561 - RNA, 43 nt, synthetic construct
  source 1..43: mol_type = other RNA
aggtacttcccacttggtttgagtggtttgcccggaggtggtg

SEQ ID NO: 11562 - RNA, 31 nt, synthetic construct
  source 1..31: mol_type = other RNA
tttaggtttgtcccacttggtttgagctgtt

SEQ ID NO: 11563 - RNA, 31 nt, synthetic construct
  source 1..31: mol_type = other RNA
tttaggtaaatcccacttggtttgagctgtt

SEQ ID NO: 11564 - RNA, 31 nt, synthetic construct
  source 1..31: mol_type = other RNA
tttatttttgggtatatccaacttggtttga

SEQ ID NO: 11565 - RNA, 31 nt, synthetic construct
  source 1..31: mol_type = other RNA
atttttagatacatcccacttagtttgagct

SEQ ID NO: 11566 - RNA, 41 nt, synthetic construct
  source 1..41: mol_type = other RNA
ttttaggtacatcccacttagtttgggcgttttgaggaggt

SEQ ID NO: 11567 - RNA, 29 nt, synthetic construct
  source 1..29: mol_type = other RNA
atttttaggtttcccacttggtttgagct

SEQ ID NO: 11568 - RNA, 29 nt, synthetic construct
  source 1..29: mol_type = other RNA
tttaggtttcccacttggtttgagctgtt

SEQ ID NO: 11569 - RNA, 29 nt, synthetic construct
  source 1..29: mol_type = other RNA
tttatttttaggtttcccacttggtttga

SEQ ID NO: 11570 - RNA, 41 nt, synthetic construct
  source 1..41: mol_type = other RNA
ctttatttttagacgcttcccccttggttcgagctgtttga

SEQ ID NO: 11571 - RNA, 41 nt, synthetic construct
  source 1..41: mol_type = other RNA
ttttaggtgcttcccccttggttcgaggggtttgaggaggt

SEQ ID NO: 11572 - RNA, 41 nt, synthetic construct
  source 1..41: mol_type = other RNA
aggtacttcccactgggtttgagcggtttgaggaggtggtg

SEQ ID NO: 11573 - RNA, 40 nt, synthetic construct
  source 1..40: mol_type = other RNA
ttttaggtatttcccacttggtatagcggtttgaggaggt

SEQ ID NO: 11574 - RNA, 32 nt, synthetic construct
  source 1..32: mol_type = other RNA
tttaggtacttcccatttggtcttgagctgtt

SEQ ID NO: 11575 - RNA, 31 nt, synthetic construct
  source 1..31: mol_type = other RNA
tacttcccaatcagtttcagtggttcgagga

SEQ ID NO: 11576 - RNA, 41 nt, synthetic construct
  source 1..41: mol_type = other RNA
aggtacttccctcctggtttgaccggtttgaggaggtggtg

SEQ ID NO: 11577 - RNA, 41 nt, synthetic construct
  source 1..41: mol_type = other RNA
aggtactttccacctggtttgagcggttcgagaaggtggtg

SEQ ID NO: 11578 - RNA, 31 nt, synthetic construct
  source 1..31: mol_type = other RNA
tacttcccacttggtttgaggggtttgagga

SEQ ID NO: 11579 - RNA, 31 nt, synthetic construct
  source 1..31: mol_type = other RNA
tttaggcaattcccaattggtttgagctgtt

SEQ ID NO: 11580 - RNA, 31 nt, synthetic construct
  source 1..31: mol_type = other RNA
tttatttttagatacttcccacttggtttga

SEQ ID NO: 11581 - RNA, 41 nt, synthetic construct
  source 1..41: mol_type = other RNA
ttttaggtcattcccacgttgtttgagcggttcgaggaggt

SEQ ID NO: 11582 - RNA, 31 nt, synthetic construct
  source 1..31: mol_type = other RNA
tactttccacttagtctgatcggtttgagga

SEQ ID NO: 11583 - RNA, 31 nt, synthetic construct
  source 1..31: mol_type = other RNA
tttattttcaggtacttcccacttggtttga

SEQ ID NO: 11584 - RNA, 31 nt, synthetic construct
  source 1..31: mol_type = other RNA
aggtggtttatccttaggtacctcccacttg

SEQ ID NO: 11585 - RNA, 41 nt, synthetic construct
  source 1..41: mol_type = other RNA
taggtgctttattcttaggtatcttccacttggtttgagct

SEQ ID NO: 11586 - RNA, 31 nt, synthetic construct
  source 1..31: mol_type = other RNA
aggtgcttattttttaggtcctttccacttg

SEQ ID NO: 11587 - RNA, 31 nt, synthetic construct
  source 1..31: mol_type = other RNA
tttatttttaggtcctttccaacttgtttga

SEQ ID NO: 11588 - RNA, 46 nt, synthetic construct
  source 1..46: mol_type = other RNA
cagcagtaggtgctttatttttatgtactttaaaaaccacttggtt

SEQ ID NO: 11589 - RNA, 31 nt, synthetic construct
  source 1..31: mol_type = other RNA
aggtgctctattattagataactccaacttg

SEQ ID NO: 11590 - RNA, 33 nt, synthetic construct
  source 1..33: mol_type = other RNA
tttattttaaggtacttcccagacttgatttga

SEQ ID NO: 11591 - RNA, 31 nt, synthetic construct
  source 1..31: mol_type = other RNA
tacttcccacttcgtttgagcggtttgagga

SEQ ID NO: 11592 - RNA, 31 nt, synthetic construct
  source 1..31: mol_type = other RNA
aggtgttatattcttatgtaactcccacttg

SEQ ID NO: 11593 - RNA, 31 nt, synthetic construct
  source 1..31: mol_type = other RNA
tactttccccttggttcgagtgctttgagga

SEQ ID NO: 11594 - RNA, 35 nt, synthetic construct
  source 1..35: mol_type = other RNA
atttttaggtacttgccacaggaaaggtttgagct

SEQ ID NO: 11595 - RNA, 31 nt, synthetic construct
  source 1..31: mol_type = other RNA
tttatccttaggtacctcccacttggtttga

SEQ ID NO: 11596 - RNA, 41 nt, synthetic construct
  source 1..41: mol_type = other RNA
aggtacttcccacttgtaatgagcggtttgtggaggtggtg

SEQ ID NO: 11597 - RNA, 41 nt, synthetic construct
  source 1..41: mol_type = other RNA
ttttaggtatttcccacttgtaatgagcggtttgaggaggt

SEQ ID NO: 11598 - RNA, 31 nt, synthetic construct
  source 1..31: mol_type = other RNA
atttttaggtgcttccctcttggtttgagct

SEQ ID NO: 11599 - RNA, 42 nt, synthetic construct
  source 1..42: mol_type = other RNA
ctttattttgtaggtgcttccctcttggtttgagctgtttga

SEQ ID NO: 11600 - RNA, 42 nt, synthetic construct
  source 1..42: mol_type = other RNA
taggtgctttatttgttggtacgtttccaattggtttgagct

SEQ ID NO: 11601 - RNA, 32 nt, synthetic construct
  source 1..32: mol_type = other RNA
aggtgctttatttttacgtacttcaccacttg

SEQ ID NO: 11602 - RNA, 42 nt, synthetic construct
  source 1..42: mol_type = other RNA
aggtacttcccacttggtcctgagcggtttgaggaggtggtg

SEQ ID NO: 11603 - RNA, 30 nt, synthetic construct
  source 1..30: mol_type = other RNA
tactttccaagcaattgagcggtttgagga

SEQ ID NO: 11604 - RNA, 42 nt, synthetic construct
  source 1..42: mol_type = other RNA
cagcagtaggtgctttttttggcggtacgtttccacttggtt

SEQ ID NO: 11605 - RNA, 41 nt, synthetic construct
  source 1..41: mol_type = other RNA
ttttaggtactttccactcggttcgagtggtttgaggaggt

SEQ ID NO: 11606 - RNA, 39 nt, synthetic construct
  source 1..39: mol_type = other RNA
ctttatttatagttactcccgacttcttgagctgtttga

SEQ ID NO: 11607 - RNA, 30 nt, synthetic construct
  source 1..30: mol_type = other RNA
tttaggtaattcccactgatttgacctgtt

SEQ ID NO: 11608 - RNA, 55 nt, synthetic construct
  source 1..55: mol_type = other RNA
atttttcgagggtctacttccgcactccagcttggtggttagagggagatgagct

SEQ ID NO: 11609 - RNA, 51 nt, synthetic construct
  source 1..51: mol_type = other RNA
tttatttttgggtccatacaccacccccaccccaccccccacttggtttga

SEQ ID NO: 11610 - RNA, 41 nt, synthetic construct
  source 1..41: mol_type = other RNA
ctttatttttaggtattttccaaatcgtttgagctgtttga

SEQ ID NO: 11611 - RNA, 36 nt, synthetic construct
  source 1..36: mol_type = other RNA
tttaggtacttcccaacttggtctcccgcagctgtt

SEQ ID NO: 11612 - RNA, 31 nt, synthetic construct
  source 1..31: mol_type = other RNA
tttattattaggtgcttcccagctggtttga

SEQ ID NO: 11613 - RNA, 49 nt, synthetic construct
  source 1..49: mol_type = other RNA
aggtacttcccaaacttggtttcagtagcgtttgtttggggaggtggtg

SEQ ID NO: 11614 - RNA, 41 nt, synthetic construct
  source 1..41: mol_type = other RNA
aggtacttcccacttggtctgagcggtttggggaggtggtg

SEQ ID NO: 11615 - RNA, 30 nt, synthetic construct
  source 1..30: mol_type = other RNA
tacttcccccttggttagagcggttgagga

SEQ ID NO: 11616 - RNA, 31 nt, synthetic construct
  source 1..31: mol_type = other RNA
tttaggtgtttcccaactggtttgagctgtt

SEQ ID NO: 11617 - RNA, 41 nt, synthetic construct
  source 1..41: mol_type = other RNA
ttttaggtagttcccactaggtttgagcggtttgaggaggt

SEQ ID NO: 11618 - RNA, 30 nt, synthetic construct
  source 1..30: mol_type = other RNA
tacttcccacttggtatagcggtttgagga

SEQ ID NO: 11619 - RNA, 32 nt, synthetic construct
  source 1..32: mol_type = other RNA
atttttcggtacttcccatttggtcttgagct

SEQ ID NO: 11620 - RNA, 42 nt, synthetic construct
  source 1..42: mol_type = other RNA
aggtacttcccatttggtcttgagtggttcgaggaggtggtg

SEQ ID NO: 11621 - RNA, 31 nt, synthetic construct
  source 1..31: mol_type = other RNA
tttatttttcggtacttcccatttggtttga

SEQ ID NO: 11622 - RNA, 41 nt, synthetic construct
  source 1..41: mol_type = other RNA
aggtactttcgacttggtttgagtggtttgaggaggtggtg

SEQ ID NO: 11623 - RNA, 31 nt, synthetic construct
  source 1..31: mol_type = other RNA
tactttcgacttggtttgagtggtttgagga

SEQ ID NO: 11624 - RNA, 31 nt, synthetic construct
  source 1..31: mol_type = other RNA
tttaggtactttccacctggtttgagctgtt

SEQ ID NO: 11625 - RNA, 31 nt, synthetic construct
  source 1..31: mol_type = other RNA
aggtgcttttttattaggtactttccacttg

SEQ ID NO: 11626 - RNA, 31 nt, synthetic construct
  source 1..31: mol_type = other RNA
tttattattaggtactttccacctggtttga

SEQ ID NO: 11627 - RNA, 41 nt, synthetic construct
  source 1..41: mol_type = other RNA
ttttaggtactttccacttggtttgagcggtttgaggaggt

SEQ ID NO: 11628 - RNA, 41 nt, synthetic construct
  source 1..41: mol_type = other RNA
aggtactttccacttagtttgagcggtttgaggaggtggtg

SEQ ID NO: 11629 - RNA, 41 nt, synthetic construct
  source 1..41: mol_type = other RNA
ttttaggtacttcccacttggtttgagaggtttgaggaggt

SEQ ID NO: 11630 - RNA, 41 nt, synthetic construct
  source 1..41: mol_type = other RNA
ctttatttttagtaactttccacttagtctgatctgtttga

SEQ ID NO: 11631 - RNA, 41 nt, synthetic construct
  source 1..41: mol_type = other RNA
ctttattttacggtgttttccaattggattgagctgtttga

SEQ ID NO: 11632 - RNA, 41 nt, synthetic construct
  source 1..41: mol_type = other RNA
cagcagtaggtgctctatcatacggtgttttccacttggtt

SEQ ID NO: 11633 - RNA, 32 nt, synthetic construct
  source 1..32: mol_type = other RNA
tttatttggcggtacttttccaattggtttga

SEQ ID NO: 11634 - RNA, 31 nt, synthetic construct
  source 1..31: mol_type = other RNA
atttttaggtattttccacttggttggagct

SEQ ID NO: 11635 - RNA, 30 nt, synthetic construct
  source 1..30: mol_type = other RNA
tttaggtattttccacttggttggactgtt

SEQ ID NO: 11636 - RNA, 31 nt, synthetic construct
  source 1..31: mol_type = other RNA
tttattattaggtattttccacttggtttga

SEQ ID NO: 11637 - RNA, 31 nt, synthetic construct
  source 1..31: mol_type = other RNA
atttttaggtcctttccaacttgtttgagct

SEQ ID NO: 11638 - RNA, 31 nt, synthetic construct
  source 1..31: mol_type = other RNA
tttaggtactttctacttagtttgagctgtt

SEQ ID NO: 11639 - RNA, 34 nt, synthetic construct
  source 1..34: mol_type = other RNA
tttatttttatgtactttaaaaaccaaggtttga

SEQ ID NO: 11640 - RNA, 31 nt, synthetic construct
  source 1..31: mol_type = other RNA
tttagataactccaacttggtttgcgctgtt

SEQ ID NO: 11641 - RNA, 41 nt, synthetic construct
  source 1..41: mol_type = other RNA
aggtacttccaacttggtttgcgcggtttgaggaggtggtg

SEQ ID NO: 11642 - RNA, 43 nt, synthetic construct
  source 1..43: mol_type = other RNA
ttttaggtacttcccagacttgatttgagcggtttgaggaggt

SEQ ID NO: 11643 - RNA, 41 nt, synthetic construct
  source 1..41: mol_type = other RNA
aggtacttcccacttcgtttgagcggtttgaggaggtggtg

SEQ ID NO: 11644 - RNA, 31 nt, synthetic construct
  source 1..31: mol_type = other RNA
atttttagattctctccacttggtttgagct

SEQ ID NO: 11645 - RNA, 31 nt, synthetic construct
  source 1..31: mol_type = other RNA
tttaggtaactcccacttgcattgagctgtt

SEQ ID NO: 11646 - RNA, 41 nt, synthetic construct
  source 1..41: mol_type = other RNA
aggtacttccctcttggtttgagcggtttgaggaggtggtg

SEQ ID NO: 11647 - RNA, 30 nt, synthetic construct
  source 1..30: mol_type = other RNA
attttaggtacttcccacttggtttgagct

SEQ ID NO: 11648 - RNA, 30 nt, synthetic construct
  source 1..30: mol_type = other RNA
tttattttaggtacttcccacttggtttga

SEQ ID NO: 11649 - RNA, 44 nt, synthetic construct
  source 1..44: mol_type = other RNA
tactttgagctatgaccagggtcctgttttgatagatttgagga

SEQ ID NO: 11650 - RNA, 32 nt, synthetic construct
  source 1..32: mol_type = other RNA
tttattttgtaggtgcttccctcttggtttga

SEQ ID NO: 11651 - RNA, 31 nt, synthetic construct
  source 1..31: mol_type = other RNA
tacttccctcttggtttgagaggttagagga

SEQ ID NO: 11652 - RNA, 31 nt, synthetic construct
  source 1..31: mol_type = other RNA
attttttggtacgtttccaattggttgagct

SEQ ID NO: 11653 - RNA, 43 nt, synthetic construct
  source 1..43: mol_type = other RNA
ctttatttttagggaattttcatacttggtacatcctgtttga

SEQ ID NO: 11654 - RNA, 42 nt, synthetic construct
  source 1..42: mol_type = other RNA
cagcagtaggtgcttgatttttagggaattttcaacttggtt

SEQ ID NO: 11655 - RNA, 31 nt, synthetic construct
  source 1..31: mol_type = other RNA
tttaggtacttccgacttggtttgtgctgtt

SEQ ID NO: 11656 - RNA, 32 nt, synthetic construct
  source 1..32: mol_type = other RNA
aggtgctttttttggcggtacgtttccacttg

SEQ ID NO: 11657 - RNA, 31 nt, synthetic construct
  source 1..31: mol_type = other RNA
atttttggtaacttcccactaggtttgagct

SEQ ID NO: 11658 - RNA, 31 nt, synthetic construct
  source 1..31: mol_type = other RNA
tacttcccactaggtttgagaggtttgagga

SEQ ID NO: 11659 - RNA, 31 nt, synthetic construct
  source 1..31: mol_type = other RNA
attttggataccattgccgattggttgagct

SEQ ID NO: 11660 - RNA, 39 nt, synthetic construct
  source 1..39: mol_type = other RNA
tacttcccacttggttctcctgcttgagcgttttgagga

SEQ ID NO: 11661 - RNA, 41 nt, synthetic construct
  source 1..41: mol_type = other RNA
aggtactttcctattgggttgagcggtttaatgaggtggtg

SEQ ID NO: 11662 - RNA, 31 nt, synthetic construct
  source 1..31: mol_type = other RNA
attttgaggtatttcccacttggattgagct

SEQ ID NO: 11663 - RNA, 41 nt, synthetic construct
  source 1..41: mol_type = other RNA
ctttatttttcggtagtttccacttcgtttgagctgtttga

SEQ ID NO: 11664 - RNA, 39 nt, synthetic construct
  source 1..39: mol_type = other RNA
aggtactttccacttcgtttgaggtttgaggaggtggtg

SEQ ID NO: 11665 - RNA, 41 nt, synthetic construct
  source 1..41: mol_type = other RNA
aggtacttcccacttggtttgagcggtttgaggaggtggtg

SEQ ID NO: 11666 - RNA, 31 nt, synthetic construct
  source 1..31: mol_type = other RNA
tttaggtgtttcccacttagtttgagctgtt

SEQ ID NO: 11667 - RNA, 41 nt, synthetic construct
  source 1..41: mol_type = other RNA
aggtacttcccacttgctttatacggtttacggaggtggtg

SEQ ID NO: 11668 - RNA, 31 nt, synthetic construct
  source 1..31: mol_type = other RNA
tacttcccacttgctttatacggtttgagga

SEQ ID NO: 11669 - RNA, 31 nt, synthetic construct
  source 1..31: mol_type = other RNA
tttaggtgcttcccagctggtttgagctgtt

SEQ ID NO: 11670 - RNA, 36 nt, synthetic construct
  source 1..36: mol_type = other RNA
tttaggtaactcccaaacttggtttcagtagctgtt

SEQ ID NO: 11671 - RNA, 31 nt, synthetic construct
  source 1..31: mol_type = other RNA
tttaggtctttcccacttggtttgagctgtt

SEQ ID NO: 11672 - RNA, 37 nt, synthetic construct
  source 1..37: mol_type = other RNA
aggtacttcccccttggttagagcggttgaggtggtg

SEQ ID NO: 11673 - RNA, 31 nt, synthetic construct
  source 1..31: mol_type = other RNA
tttatttttgggtaaatcccacttggtttga

SEQ ID NO: 11674 - RNA, 31 nt, synthetic construct
  source 1..31: mol_type = other RNA
atttttgggtatatccaacttggtttgagct

SEQ ID NO: 11675 - RNA, 31 nt, synthetic construct
  source 1..31: mol_type = other RNA
tacttccaacttggtttgagcggtttgagga

SEQ ID NO: 11676 - RNA, 32 nt, synthetic construct
  source 1..32: mol_type = other RNA
tttaggtacttcccacctgactttgagctgtt

SEQ ID NO: 11677 - RNA, 31 nt, synthetic construct
  source 1..31: mol_type = other RNA
tttatttttgggtacttcccacctgatttga

SEQ ID NO: 11678 - RNA, 41 nt, synthetic construct
  source 1..41: mol_type = other RNA
ttttaggtgcttccgactaggttcgagcggtttgaggaggt

SEQ ID NO: 11679 - RNA, 31 nt, synthetic construct
  source 1..31: mol_type = other RNA
tttagatacatcccacttagtttgggctgtt

SEQ ID NO: 11680 - RNA, 41 nt, synthetic construct
  source 1..41: mol_type = other RNA
aggtacttccccctaggtttgagcggttggaggaggtggtg

SEQ ID NO: 11681 - RNA, 31 nt, synthetic construct
  source 1..31: mol_type = other RNA
tttagacgcttcccccttggttcgagctgtt

SEQ ID NO: 11682 - RNA, 31 nt, synthetic construct
  source 1..31: mol_type = other RNA
tttaggtccttcccccttggtgtgagctgtt

SEQ ID NO: 11683 - RNA, 31 nt, synthetic construct
  source 1..31: mol_type = other RNA
tacttcccactgggtttgagcggtttgagga

SEQ ID NO: 11684 - RNA, 31 nt, synthetic construct
  source 1..31: mol_type = other RNA
tttatttctaggtatttcccacttggtttga

SEQ ID NO: 11685 - RNA, 42 nt, synthetic construct
  source 1..42: mol_type = other RNA
ttttaggtacttcccatttggtcttgagtggttcgaggaggt

SEQ ID NO: 11686 - RNA, 41 nt, synthetic construct
  source 1..41: mol_type = other RNA
ttttaggtgtttcccaatcagtttcagtggttcgaggaggt

SEQ ID NO: 11687 - RNA, 41 nt, synthetic construct
  source 1..41: mol_type = other RNA
aggtactttccacttggtttgagcggtttgaggaggtggtg

SEQ ID NO: 11688 - RNA, 31 nt, synthetic construct
  source 1..31: mol_type = other RNA
tttaggtatttcccacttggtttgagctgtt

SEQ ID NO: 11689 - RNA, 41 nt, synthetic construct
  source 1..41: mol_type = other RNA
cagcagtaggcaggctttatttaggtatttcccacttggtt

SEQ ID NO: 11690 - RNA, 42 nt, synthetic construct
  source 1..42: mol_type = other RNA
taggtgctttattttagaacacaactccacttggtttgagct

SEQ ID NO: 11691 - RNA, 31 nt, synthetic construct
  source 1..31: mol_type = other RNA
tttaggtgttttccacttggtttgagctgtt

SEQ ID NO: 11692 - RNA, 41 nt, synthetic construct
  source 1..41: mol_type = other RNA
aggtactttccacttggtttgagtggtttgcggaggtggtg

SEQ ID NO: 11693 - RNA, 31 nt, synthetic construct
  source 1..31: mol_type = other RNA
atttttagatacttcccacttggactgagct

SEQ ID NO: 11694 - RNA, 41 nt, synthetic construct
  source 1..41: mol_type = other RNA
aggtactttccacttagtctgatcggtttgaggaggtggtg

SEQ ID NO: 11695 - RNA, 42 nt, synthetic construct
  source 1..42: mol_type = other RNA
ttttaggtaactttccacttagtctgatcggtttgaggaggt

SEQ ID NO: 11696 - RNA, 27 nt, synthetic construct
  source 1..27: mol_type = other RNA
tttagatcccacttggtttgagctgtt

SEQ ID NO: 11697 - RNA, 41 nt, synthetic construct
  source 1..41: mol_type = other RNA
ttttaggtacttcccacttggttagagcggtttgaggaggt

SEQ ID NO: 11698 - RNA, 45 nt, synthetic construct
  source 1..45: mol_type = other RNA
aggtacttcccacttaaacaatttgagcggtctgagcaggtggtg

SEQ ID NO: 11699 - RNA, 41 nt, synthetic construct
  source 1..41: mol_type = other RNA
aggtactttccaattggattgagtgatttgaggaggtggtg

SEQ ID NO: 11700 - RNA, 31 nt, synthetic construct
  source 1..31: mol_type = other RNA
tttattcttaggtatcttccacttggtttga

SEQ ID NO: 11701 - RNA, 31 nt, synthetic construct
  source 1..31: mol_type = other RNA
atttttaggtaattcccacttggttcgagct

SEQ ID NO: 11702 - RNA, 31 nt, synthetic construct
  source 1..31: mol_type = other RNA
tttatttttaggtaattcccacttggtttga

SEQ ID NO: 11703 - RNA, 41 nt, synthetic construct
  source 1..41: mol_type = other RNA
aggtactttccacttggttggacgcttacgaggaggtggtg

SEQ ID NO: 11704 - RNA, 41 nt, synthetic construct
  source 1..41: mol_type = other RNA
taggtgcttattttttaggtcctttccaacttgtttgagct

SEQ ID NO: 11705 - RNA, 41 nt, synthetic construct
  source 1..41: mol_type = other RNA
ttttaggtactttctacttagtttgagtggtttgaggaggt

SEQ ID NO: 11706 - RNA, 31 nt, synthetic construct
  source 1..31: mol_type = other RNA
tttaggtacttcccactaggtttatactgtt

SEQ ID NO: 11707 - RNA, 43 nt, synthetic construct
  source 1..43: mol_type = other RNA
aggtacttcccactaggtttatagtaggttcgagaaggtggtg

SEQ ID NO: 11708 - RNA, 41 nt, synthetic construct
  source 1..41: mol_type = other RNA
aggtactttccactggatttgagtggtttgaggaggtggtg

SEQ ID NO: 11709 - RNA, 31 nt, synthetic construct
  source 1..31: mol_type = other RNA
atttttgggtattttccacttggtttgagct

SEQ ID NO: 11710 - RNA, 31 nt, synthetic construct
  source 1..31: mol_type = other RNA
tttattccgaggtgttacccacttcgtttga

SEQ ID NO: 11711 - RNA, 31 nt, synthetic construct
  source 1..31: mol_type = other RNA
aggtgctctatcgttagattctctccacttg

SEQ ID NO: 11712 - RNA, 31 nt, synthetic construct
  source 1..31: mol_type = other RNA
atttttaggcactttccccttggttcgagct

SEQ ID NO: 11713 - RNA, 41 nt, synthetic construct
  source 1..41: mol_type = other RNA
ctttatttttaggcactttccccttggttcgagctgtttga

SEQ ID NO: 11714 - RNA, 31 nt, synthetic construct
  source 1..31: mol_type = other RNA
aggtgctctgttgttaggcactttccacttg

SEQ ID NO: 11715 - RNA, 35 nt, synthetic construct
  source 1..35: mol_type = other RNA
tttatttataggtacttgccacaggaaaggtttga

SEQ ID NO: 11716 - RNA, 31 nt, synthetic construct
  source 1..31: mol_type = other RNA
tacttccctcttggtttgagcggtttgagga

SEQ ID NO: 11717 - RNA, 31 nt, synthetic construct
  source 1..31: mol_type = other RNA
atttttaggtacctcccacttggttcgagct

SEQ ID NO: 11718 - RNA, 41 nt, synthetic construct
  source 1..41: mol_type = other RNA
ttttaggtacctcccacttggttcgagcggtttgaggaggt

SEQ ID NO: 11719 - RNA, 31 nt, synthetic construct
  source 1..31: mol_type = other RNA
tttatatttgggtatttccctcctggtttga

SEQ ID NO: 11720 - RNA, 31 nt, synthetic construct
  source 1..31: mol_type = other RNA
tttatttttacgtacttcccgcttggtttga

SEQ ID NO: 11721 - RNA, 31 nt, synthetic construct
  source 1..31: mol_type = other RNA
tacttcccgcttggtttgtacggtttgagga

SEQ ID NO: 11722 - RNA, 40 nt, synthetic construct
  source 1..40: mol_type = other RNA
ctttattttaggtacttcccacttggtttgagctgtttga

SEQ ID NO: 11723 - RNA, 31 nt, synthetic construct
  source 1..31: mol_type = other RNA
tttatttttacgtacttcaccctcggtttga

SEQ ID NO: 11724 - RNA, 31 nt, synthetic construct
  source 1..31: mol_type = other RNA
tttatttttcacgtattcccacttggtttga

SEQ ID NO: 11725 - RNA, 32 nt, synthetic construct
  source 1..32: mol_type = other RNA
tttaggtacttcccacttggtcctgagctgtt

SEQ ID NO: 11726 - RNA, 31 nt, synthetic construct
  source 1..31: mol_type = other RNA
tttatttttcggtacttcccacttggtttga

SEQ ID NO: 11727 - RNA, 31 nt, synthetic construct
  source 1..31: mol_type = other RNA
atttttaggcgctttccacttggttcgagct

SEQ ID NO: 11728 - RNA, 41 nt, synthetic construct
  source 1..41: mol_type = other RNA
aggtactttccaattcgtttgaatggttggaggaggtggtg

SEQ ID NO: 11729 - RNA, 41 nt, synthetic construct
  source 1..41: mol_type = other RNA
ttttaggtattttccaattcgtttgaatggttggaggaggt

SEQ ID NO: 11730 - RNA, 40 nt, synthetic construct
  source 1..40: mol_type = other RNA
taggtgctttgagttaggtattttccaattcgtttgagct

SEQ ID NO: 11731 - RNA, 31 nt, synthetic construct
  source 1..31: mol_type = other RNA
tactttccaattcgtttgaatggttggagga

SEQ ID NO: 11732 - RNA, 41 nt, synthetic construct
  source 1..41: mol_type = other RNA
ttttaggtcatttccacttcgtttgagtggtttgaggaggt

SEQ ID NO: 11733 - RNA, 31 nt, synthetic construct
  source 1..31: mol_type = other RNA
tttatcgttagagcattcccacttggtttga

SEQ ID NO: 11734 - RNA, 41 nt, synthetic construct
  source 1..41: mol_type = other RNA
aggtacttcccacttggattgaacgtgttgatgaggtggtg

SEQ ID NO: 11735 - RNA, 55 nt, synthetic construct
  source 1..55: mol_type = other RNA
ctttatttataggcgcttcccacacacacacacacttcgttgttgagctgtttga

SEQ ID NO: 11736 - RNA, 57 nt, synthetic construct
  source 1..57: mol_type = other RNA
aggtacttcccacacacacacacacttcgttgttgagcgcgttttgacaaggtggtg

SEQ ID NO: 11737 - RNA, 57 nt, synthetic construct
  source 1..57: mol_type = other RNA
ttttaggtgcttcccacacacacacacacttcgttgttgagcgcgttttgaggaggt

SEQ ID NO: 11738 - RNA, 32 nt, synthetic construct
  source 1..32: mol_type = other RNA
tttattgttaaggcacttccgtcttggtttga

SEQ ID NO: 11739 - RNA, 31 nt, synthetic construct
  source 1..31: mol_type = other RNA
aggtgctctactgttcggtagtttccacttg

SEQ ID NO: 11740 - RNA, 39 nt, synthetic construct
  source 1..39: mol_type = other RNA
ttttaggtagtttccacttcgtttgaggtttgaggaggt

SEQ ID NO: 11741 - RNA, 52 nt, synthetic construct
  source 1..52: mol_type = other RNA
tttaggtctacttccgcactccagcttggtggttagagggagatgagctgtt

SEQ ID NO: 11742 - RNA, 45 nt, synthetic construct
  source 1..45: mol_type = other RNA
tttatcttcgagggtctacttccgcactccagcttggtggtttga

SEQ ID NO: 11743 - RNA, 55 nt, synthetic construct
  source 1..55: mol_type = other RNA
aggtacttcccacttgatttgagcggaaaaaaattagttcaccatggaggtggtg

SEQ ID NO: 11744 - RNA, 31 nt, synthetic construct
  source 1..31: mol_type = other RNA
tttaggtattttccaaatcgtttgagctgtt

SEQ ID NO: 11745 - RNA, 41 nt, synthetic construct
  source 1..41: mol_type = other RNA
ttttaggtattttccaaatcgtttgagtggtttgaggaggt

SEQ ID NO: 11746 - RNA, 31 nt, synthetic construct
  source 1..31: mol_type = other RNA
atttttgggtacatcccacttggtttgagct

SEQ ID NO: 11747 - RNA, 31 nt, synthetic construct
  source 1..31: mol_type = other RNA
tttaggtacatcccacttggtttgagctgtt

SEQ ID NO: 11748 - RNA, 41 nt, synthetic construct
  source 1..41: mol_type = other RNA
ttttaggtacatcccacttggtttgagcggtttgaggaggt

SEQ ID NO: 11749 - RNA, 31 nt, synthetic construct
  source 1..31: mol_type = other RNA
tttattcctgggtacatcccacttggtttga

SEQ ID NO: 11750 - RNA, 32 nt, synthetic construct
  source 1..32: mol_type = other RNA
atttttaggtacttcccaacttggtctgagct

SEQ ID NO: 11751 - RNA, 46 nt, synthetic construct
  source 1..46: mol_type = other RNA
ctttatttttaggtacttcccaacttggtctcccgcagctgtttga

SEQ ID NO: 11752 - RNA, 46 nt, synthetic construct
  source 1..46: mol_type = other RNA
ttttaggtacttcccaacttggtctcccgcagcggtatgaggaggt

SEQ ID NO: 11753 - RNA, 41 nt, synthetic construct
  source 1..41: mol_type = other RNA
ttttaggtgtttcccacttagtttgagtggttcgaggaggt

SEQ ID NO: 11754 - RNA, 31 nt, synthetic construct
  source 1..31: mol_type = other RNA
tttatttttaggtgtttcccacttagtttga

SEQ ID NO: 11755 - RNA, 31 nt, synthetic construct
  source 1..31: mol_type = other RNA
tacttcccacttagtttgagtggttcgagga

SEQ ID NO: 11756 - RNA, 31 nt, synthetic construct
  source 1..31: mol_type = other RNA
tttatttttaggtacttcccacttgctttga

SEQ ID NO: 11757 - RNA, 31 nt, synthetic construct
  source 1..31: mol_type = other RNA
atttttaggtgcttcccagctggtttgagct

SEQ ID NO: 11758 - RNA, 41 nt, synthetic construct
  source 1..41: mol_type = other RNA
ttttaggtgcttcccagctggtttgagcggtttgaggaggt

SEQ ID NO: 11759 - RNA, 31 nt, synthetic construct
  source 1..31: mol_type = other RNA
tacttcccagctggtttgagcggtttgagga

SEQ ID NO: 11760 - RNA, 49 nt, synthetic construct
  source 1..49: mol_type = other RNA
ttttaggtaactcccaaacttggtttcagtagcgtttgtttgaggaggt

SEQ ID NO: 11761 - RNA, 33 nt, synthetic construct
  source 1..33: mol_type = other RNA
tttatttttaggtaactcccaaacttggtttga

SEQ ID NO: 11762 - RNA, 31 nt, synthetic construct
  source 1..31: mol_type = other RNA
atttttaggtctttcccacttggtttgagct

SEQ ID NO: 11763 - RNA, 31 nt, synthetic construct
  source 1..31: mol_type = other RNA
tttatttttaggtctttcccacttggtttga

SEQ ID NO: 11764 - RNA, 31 nt, synthetic construct
  source 1..31: mol_type = other RNA
tttaggtgcttccgaattggtttgagctgtt

SEQ ID NO: 11765 - RNA, 31 nt, synthetic construct
  source 1..31: mol_type = other RNA
tttaggtcattcccacttggtttgagctgtt

SEQ ID NO: 11766 - RNA, 41 nt, synthetic construct
  source 1..41: mol_type = other RNA
ttttaggtcattcccacttggtttgagtggtttgaggaggt

SEQ ID NO: 11767 - RNA, 33 nt, synthetic construct
  source 1..33: mol_type = other RNA
tttaggtattttcccggcatggtttggtctgtt

SEQ ID NO: 11768 - RNA, 31 nt, synthetic construct
  source 1..31: mol_type = other RNA
atttttgggtttgtcccacttggtttgagct

SEQ ID NO: 11769 - RNA, 41 nt, synthetic construct
  source 1..41: mol_type = other RNA
ttttaggtttgtcccacttggtttgagaggtttgaggaggt

SEQ ID NO: 11770 - RNA, 31 nt, synthetic construct
  source 1..31: mol_type = other RNA
tttatttttgggtttgtcccacttggtttga

SEQ ID NO: 11771 - RNA, 31 nt, synthetic construct
  source 1..31: mol_type = other RNA
tacttcccacttggtttgagaggtttgagga

SEQ ID NO: 11772 - RNA, 31 nt, synthetic construct
  source 1..31: mol_type = other RNA
tacttcccacttggtctgagcggtttgagga

SEQ ID NO: 11773 - RNA, 41 nt, synthetic construct
  source 1..41: mol_type = other RNA
aggtactttccacttggtttgagaggttaaaggaggtggtg

SEQ ID NO: 11774 - RNA, 41 nt, synthetic construct
  source 1..41: mol_type = other RNA
ttttaggtactttccacttggtttgagaggttagaggaggt

SEQ ID NO: 11775 - RNA, 40 nt, synthetic construct
  source 1..40: mol_type = other RNA
ttttaggtacttcccccttggttagagcggttgaggaggt

SEQ ID NO: 11776 - RNA, 31 nt, synthetic construct
  source 1..31: mol_type = other RNA
atttttagatgcttcccactaggtttgagct

SEQ ID NO: 11777 - RNA, 41 nt, synthetic construct
  source 1..41: mol_type = other RNA
ttttaggtgcttcccactaggtttgagcggtttgaggaggt

SEQ ID NO: 11778 - RNA, 31 nt, synthetic construct
  source 1..31: mol_type = other RNA
tttatttttagatgcttcccactaggtttga

SEQ ID NO: 11779 - RNA, 31 nt, synthetic construct
  source 1..31: mol_type = other RNA
tacttcccacttggtttgagcggtttgagga

SEQ ID NO: 11780 - RNA, 31 nt, synthetic construct
  source 1..31: mol_type = other RNA
tttaggtatatccaacttggtttgagctgtt

SEQ ID NO: 11781 - RNA, 41 nt, synthetic construct
  source 1..41: mol_type = other RNA
ttttaggtatatccaacttggtttgagcggtttgaggaggt

SEQ ID NO: 11782 - RNA, 32 nt, synthetic construct
  source 1..32: mol_type = other RNA
atttttgggtacttcccacctgactttgagct

SEQ ID NO: 11783 - RNA, 42 nt, synthetic construct
  source 1..42: mol_type = other RNA
ttttaggtacttcccacctgactttgagcggtttgaggaggt

SEQ ID NO: 11784 - RNA, 31 nt, synthetic construct
  source 1..31: mol_type = other RNA
atttttaggtgcttcctacggggtttgagct

SEQ ID NO: 11785 - RNA, 31 nt, synthetic construct
  source 1..31: mol_type = other RNA
tttaggtgcttcctacggggtttgagctgtt

SEQ ID NO: 11786 - RNA, 31 nt, synthetic construct
  source 1..31: mol_type = other RNA
tttatttttaggtgcttcctacggggtttga

SEQ ID NO: 11787 - RNA, 31 nt, synthetic construct
  source 1..31: mol_type = other RNA
tacttcctacggggtttgagtgccttgagga

SEQ ID NO: 11788 - RNA, 31 nt, synthetic construct
  source 1..31: mol_type = other RNA
atttttagacgcttccgactaggttcgagct

SEQ ID NO: 11789 - RNA, 31 nt, synthetic construct
  source 1..31: mol_type = other RNA
tttagacgcttccgactaggttcgagctgtt

SEQ ID NO: 11790 - RNA, 31 nt, synthetic construct
  source 1..31: mol_type = other RNA
tttatttttagacgcttccgactaggtttga

SEQ ID NO: 11791 - RNA, 41 nt, synthetic construct
  source 1..41: mol_type = other RNA
aggtacttcccaactggtttgagtggtttgaggaggtggtg

SEQ ID NO: 11792 - RNA, 31 nt, synthetic construct
  source 1..31: mol_type = other RNA
tttatttttaggtgtttcccaactggtttga

SEQ ID NO: 11793 - RNA, 31 nt, synthetic construct
  source 1..31: mol_type = other RNA
tttagacagttcccactaggtttgagctgtt

SEQ ID NO: 11794 - RNA, 31 nt, synthetic construct
  source 1..31: mol_type = other RNA
tacttcccactaggtttgagcggtttgagga

SEQ ID NO: 11795 - RNA, 41 nt, synthetic construct
  source 1..41: mol_type = other RNA
aggtacttcccaattggttcaagcggttcaaggaggtggtg

SEQ ID NO: 11796 - RNA, 31 nt, synthetic construct
  source 1..31: mol_type = other RNA
atttttaggtaattccccctaggtttgagct

SEQ ID NO: 11797 - RNA, 31 nt, synthetic construct
  source 1..31: mol_type = other RNA
tttaggtaattccccctaggtttgagctgtt

SEQ ID NO: 11798 - RNA, 32 nt, synthetic construct
  source 1..32: mol_type = other RNA
atttttaggcaattcccccttggttttgagct

SEQ ID NO: 11799 - RNA, 41 nt, synthetic construct
  source 1..41: mol_type = other RNA
aggtacttcccccttggttttgagcggtttggcaggtggtg

SEQ ID NO: 11800 - RNA, 42 nt, synthetic construct
  source 1..42: mol_type = other RNA
ttttaggtaattcccccttggttttgagcggtttgaggaggt

SEQ ID NO: 11801 - RNA, 41 nt, synthetic construct
  source 1..41: mol_type = other RNA
aggtacttcccccttggttcgaggggtttgaggaggtggtg

SEQ ID NO: 11802 - RNA, 31 nt, synthetic construct
  source 1..31: mol_type = other RNA
tttatttttaggtccttcccccttggtttga

SEQ ID NO: 11803 - RNA, 41 nt, synthetic construct
  source 1..41: mol_type = other RNA
ttttaggtattccccactgggtttgagcggtttgaggaggt

SEQ ID NO: 11804 - RNA, 31 nt, synthetic construct
  source 1..31: mol_type = other RNA
tttatttttaggtattccccactgggtttga

SEQ ID NO: 11805 - RNA, 31 nt, synthetic construct
  source 1..31: mol_type = other RNA
atttttaggtacttcccacttggtatgagct

SEQ ID NO: 11806 - RNA, 41 nt, synthetic construct
  source 1..41: mol_type = other RNA
aggtacttcccacttggtatgagaggtttgtggaggtggtg

SEQ ID NO: 11807 - RNA, 31 nt, synthetic construct
  source 1..31: mol_type = other RNA
tttattcctaggtacttcccacttggtttga

SEQ ID NO: 11808 - RNA, 31 nt, synthetic construct
  source 1..31: mol_type = other RNA
tacttcccacttggtatgagaggtttgagga

SEQ ID NO: 11809 - RNA, 30 nt, synthetic construct
  source 1..30: mol_type = other RNA
tttaggtatttcccacttggtatagctgtt

SEQ ID NO: 11810 - RNA, 32 nt, synthetic construct
  source 1..32: mol_type = other RNA
tacttcccatttggtcttgagtggttcgagga

SEQ ID NO: 11811 - RNA, 41 nt, synthetic construct
  source 1..41: mol_type = other RNA
aggtacttcccaatcagtttcagtggttcaaggaggtggtg

SEQ ID NO: 11812 - RNA, 31 nt, synthetic construct
  source 1..31: mol_type = other RNA
atttttaggtgcttccctcctggtttgagct

SEQ ID NO: 11813 - RNA, 31 nt, synthetic construct
  source 1..31: mol_type = other RNA
tacttcccacttggtttgagcggttcgagga

SEQ ID NO: 11814 - RNA, 41 nt, synthetic construct
  source 1..41: mol_type = other RNA
ttttaggtactttccacctggtttgagcggttcgaggaggt

SEQ ID NO: 11815 - RNA, 31 nt, synthetic construct
  source 1..31: mol_type = other RNA
atttttaggtactttccacttggtttgagct

SEQ ID NO: 11816 - RNA, 31 nt, synthetic construct
  source 1..31: mol_type = other RNA
tttatttttaggtatttcccacttggtttga

SEQ ID NO: 11817 - RNA, 31 nt, synthetic construct
  source 1..31: mol_type = other RNA
atttttaggtatttcccacttggtttgagct

SEQ ID NO: 11818 - RNA, 41 nt, synthetic construct
  source 1..41: mol_type = other RNA
ttttaggtactttccacttagtttgagcggtttgaggaggt

SEQ ID NO: 11819 - RNA, 32 nt, synthetic construct
  source 1..32: mol_type = other RNA
aggtgctttattttagtacacaactccacttg

SEQ ID NO: 11820 - RNA, 31 nt, synthetic construct
  source 1..31: mol_type = other RNA
aggtgcttcatttttaggtactatccacttg

SEQ ID NO: 11821 - RNA, 31 nt, synthetic construct
  source 1..31: mol_type = other RNA
tactttccaattggttcctagggttcgagga

SEQ ID NO: 11822 - RNA, 31 nt, synthetic construct
  source 1..31: mol_type = other RNA
tacttcccaattggtttgagcggtttgagga

SEQ ID NO: 11823 - RNA, 31 nt, synthetic construct
  source 1..31: mol_type = other RNA
tttagatacttcccacttggactgagctgtt

SEQ ID NO: 11824 - RNA, 31 nt, synthetic construct
  source 1..31: mol_type = other RNA
tttaggtcattcccacgttgtttgagctgtt

SEQ ID NO: 11825 - RNA, 41 nt, synthetic construct
  source 1..41: mol_type = other RNA
aggtacttcccacgttgtttgagcggttcgagaaggtggtg

SEQ ID NO: 11826 - RNA, 31 nt, synthetic construct
  source 1..31: mol_type = other RNA
atttttagtaactttccacttagtctgagct

SEQ ID NO: 11827 - RNA, 32 nt, synthetic construct
  source 1..32: mol_type = other RNA
tttaggtaactttccacttagtctgatctgtt

SEQ ID NO: 11828 - RNA, 27 nt, synthetic construct
  source 1..27: mol_type = other RNA
atttttagatcccacttggtttgagct

SEQ ID NO: 11829 - RNA, 38 nt, synthetic construct
  source 1..38: mol_type = other RNA
ctttatttcgtagatcccacttggtttgagctgtttga

SEQ ID NO: 11830 - RNA, 28 nt, synthetic construct
  source 1..28: mol_type = other RNA
tttattccgtagatcccacttggtttga

SEQ ID NO: 11831 - RNA, 31 nt, synthetic construct
  source 1..31: mol_type = other RNA
attttcaggtacttcccacttggttagagct

SEQ ID NO: 11832 - RNA, 31 nt, synthetic construct
  source 1..31: mol_type = other RNA
atttttaggtacctcccacttggtttgagct

SEQ ID NO: 11833 - RNA, 41 nt, synthetic construct
  source 1..41: mol_type = other RNA
ttttaggtacctcccacttggtttgggcgggttgaggaggt

SEQ ID NO: 11834 - RNA, 31 nt, synthetic construct
  source 1..31: mol_type = other RNA
tacttcccacttggtttgggcgggttgagga

SEQ ID NO: 11835 - RNA, 35 nt, synthetic construct
  source 1..35: mol_type = other RNA
atttttagccacttcccacttaaacaatttgagct

SEQ ID NO: 11836 - RNA, 35 nt, synthetic construct
  source 1..35: mol_type = other RNA
tttagccacttcccacttaaacaatttgagctgtt

SEQ ID NO: 11837 - RNA, 45 nt, synthetic construct
  source 1..45: mol_type = other RNA
ttttaggtacttcccacttaaacaatttgagcggtctgaggaggt

SEQ ID NO: 11838 - RNA, 31 nt, synthetic construct
  source 1..31: mol_type = other RNA
tttatttttagccacttcccacttaatttga

SEQ ID NO: 11839 - RNA, 41 nt, synthetic construct
  source 1..41: mol_type = other RNA
aggtacttcccatatggtttgagcggttaaaggaggtggtg

SEQ ID NO: 11840 - RNA, 41 nt, synthetic construct
  source 1..41: mol_type = other RNA
ttttaggtatttcccatatggtttgagcggttagaggaggt

SEQ ID NO: 11841 - RNA, 31 nt, synthetic construct
  source 1..31: mol_type = other RNA
tttaggtctcccacttaaggtttgagctgtt

SEQ ID NO: 11842 - RNA, 31 nt, synthetic construct
  source 1..31: mol_type = other RNA
attttacggtgttttccaattggattgagct

SEQ ID NO: 11843 - RNA, 41 nt, synthetic construct
  source 1..41: mol_type = other RNA
taggtgctctatcatacggtgttttccaattggtttgagct

SEQ ID NO: 11844 - RNA, 31 nt, synthetic construct
  source 1..31: mol_type = other RNA
tactttccaattggattgagtgatttgagga

SEQ ID NO: 11845 - RNA, 31 nt, synthetic construct
  source 1..31: mol_type = other RNA
aggtgctttattcttaggtatcttccacttg

SEQ ID NO: 11846 - RNA, 28 nt, synthetic construct
  source 1..28: mol_type = other RNA
tttaggtaattcccacttggttcctgtt

SEQ ID NO: 11847 - RNA, 31 nt, synthetic construct
  source 1..31: mol_type = other RNA
attttgcggtacttttccaattggttgagct

SEQ ID NO: 11848 - RNA, 41 nt, synthetic construct
  source 1..41: mol_type = other RNA
ctttatttggcggtacttttccaattggttgagctgtttga

SEQ ID NO: 11849 - RNA, 40 nt, synthetic construct
  source 1..40: mol_type = other RNA
ttttaggtattttccacttggttggacgcttagaggaggt

SEQ ID NO: 11850 - RNA, 41 nt, synthetic construct
  source 1..41: mol_type = other RNA
aggtactttccaacttgtttgagtggttcgagaaggtggtg

SEQ ID NO: 11851 - RNA, 41 nt, synthetic construct
  source 1..41: mol_type = other RNA
ttttaggtcctttccaacttgtttgagtggttcgaggaggt

SEQ ID NO: 11852 - RNA, 31 nt, synthetic construct
  source 1..31: mol_type = other RNA
tactttccaacttgtttgagtggttcgagga

SEQ ID NO: 11853 - RNA, 31 nt, synthetic construct
  source 1..31: mol_type = other RNA
tactttctacttagtttgagtggtttgagga

SEQ ID NO: 11854 - RNA, 43 nt, synthetic construct
  source 1..43: mol_type = other RNA
ttttaggtacttcccactaggtttatagtaggttcgaggaggt

SEQ ID NO: 11855 - RNA, 31 nt, synthetic construct
  source 1..31: mol_type = other RNA
tttattgttaggtacttcccactaggtttga

SEQ ID NO: 11856 - RNA, 36 nt, synthetic construct
  source 1..36: mol_type = other RNA
aggtgctttatttttatgtactttaaaaaccacttg

SEQ ID NO: 11857 - RNA, 41 nt, synthetic construct
  source 1..41: mol_type = other RNA
ttttaggtaactccaacttggtttgcgcggtttgaggaggt

SEQ ID NO: 11858 - RNA, 31 nt, synthetic construct
  source 1..31: mol_type = other RNA
tacttccaacttggtttgcgcggtttgagga

SEQ ID NO: 11859 - RNA, 30 nt, synthetic construct
  source 1..30: mol_type = other RNA
aggtgcttatttgtgggtattttccacttg

SEQ ID NO: 11860 - RNA, 31 nt, synthetic construct
  source 1..31: mol_type = other RNA
tttaggtacttcccacctggtttgagctgtt

SEQ ID NO: 11861 - RNA, 43 nt, synthetic construct
  source 1..43: mol_type = other RNA
aggtacttcccagacttgatttgagcggtttgaggaggtggtg

SEQ ID NO: 11862 - RNA, 33 nt, synthetic construct
  source 1..33: mol_type = other RNA
tacttcccagacttgatttgagcggtttgagga

SEQ ID NO: 11863 - RNA, 41 nt, synthetic construct
  source 1..41: mol_type = other RNA
ttttaggtgttacccacttcgtttgagcggtttgaggaggt

SEQ ID NO: 11864 - RNA, 49 nt, synthetic construct
  source 1..49: mol_type = other RNA
aggtactttccacttggtttgctggcgtcagtcgcccaaggaggtggtg

SEQ ID NO: 11865 - RNA, 46 nt, synthetic construct
  source 1..46: mol_type = other RNA
ttttaggttctctccacttggtttgctggcgtcagtcggaggaggt

SEQ ID NO: 11866 - RNA, 31 nt, synthetic construct
  source 1..31: mol_type = other RNA
tttatcgttagattctctccacttggtttga

SEQ ID NO: 11867 - RNA, 31 nt, synthetic construct
  source 1..31: mol_type = other RNA
atttttatgtaactcccacttgcattgagct

SEQ ID NO: 11868 - RNA, 52 nt, synthetic construct
  source 1..52: mol_type = other RNA
ttttaggtaactcccacttgcattgagcgccaaatcttggttctgaggaggt

SEQ ID NO: 11869 - RNA, 31 nt, synthetic construct
  source 1..31: mol_type = other RNA
tttattcttatgtaactcccacttgctttga

SEQ ID NO: 11870 - RNA, 31 nt, synthetic construct
  source 1..31: mol_type = other RNA
tttaggcactttccccttggttcgagctgtt

SEQ ID NO: 11871 - RNA, 41 nt, synthetic construct
  source 1..41: mol_type = other RNA
aggtactttccccttggttcgagtgctttcaggaggtggtg

SEQ ID NO: 11872 - RNA, 41 nt, synthetic construct
  source 1..41: mol_type = other RNA
ttttaggtgcttccctcttggtttgagcggtttgaggaggt

SEQ ID NO: 11873 - RNA, 41 nt, synthetic construct
  source 1..41: mol_type = other RNA
aggtacttcccacttggtttgagcgattggaggaggtggtg

SEQ ID NO: 11874 - RNA, 31 nt, synthetic construct
  source 1..31: mol_type = other RNA
tacttcccacttggtttgagcgattggagga

SEQ ID NO: 11875 - RNA, 41 nt, synthetic construct
  source 1..41: mol_type = other RNA
aggtacttcccgcttggctcgagcggtttgaggaggtggtg

SEQ ID NO: 11876 - RNA, 31 nt, synthetic construct
  source 1..31: mol_type = other RNA
tacttcccacttggttcgagcggtttgagga

SEQ ID NO: 11877 - RNA, 31 nt, synthetic construct
  source 1..31: mol_type = other RNA
tttaggtatttccctcctggtttgagctgtt

SEQ ID NO: 11878 - RNA, 31 nt, synthetic construct
  source 1..31: mol_type = other RNA
atttttacgtacttcccgcttggtttgagct

SEQ ID NO: 11879 - RNA, 31 nt, synthetic construct
  source 1..31: mol_type = other RNA
tttaggtacttcccgcttggtttgtactgtt

SEQ ID NO: 11880 - RNA, 41 nt, synthetic construct
  source 1..41: mol_type = other RNA
ttttaggtacttcccgcttggtttgtacggtttgaggaggt

SEQ ID NO: 11881 - RNA, 31 nt, synthetic construct
  source 1..31: mol_type = other RNA
atttttaggtatttcccacttgtaatgagct

SEQ ID NO: 11882 - RNA, 31 nt, synthetic construct
  source 1..31: mol_type = other RNA
tttattcataggtatttcccacttgttttga

SEQ ID NO: 11883 - RNA, 31 nt, synthetic construct
  source 1..31: mol_type = other RNA
tacttcccacttgtaatgagcggtttgagga

SEQ ID NO: 11884 - RNA, 54 nt, synthetic construct
  source 1..54: mol_type = other RNA
ctttatttttaggtactgtgagctatgaccagggtcctgttttgatctgtttga

SEQ ID NO: 11885 - RNA, 54 nt, synthetic construct
  source 1..54: mol_type = other RNA
aggtactttgagctatgaccagggtcctgttttgatagatttgaggaggtggtg

SEQ ID NO: 11886 - RNA, 54 nt, synthetic construct
  source 1..54: mol_type = other RNA
ttttaggtactgtgagctatgaccagggtcctgttttgatagatttgaggaggt

SEQ ID NO: 11887 - RNA, 42 nt, synthetic construct
  source 1..42: mol_type = other RNA
aggtacttccctcttggtttgagaggttatcaggaggtggtg

SEQ ID NO: 11888 - RNA, 32 nt, synthetic construct
  source 1..32: mol_type = other RNA
aggtgctttatttgttggtacgtttccacttg

SEQ ID NO: 11889 - RNA, 41 nt, synthetic construct
  source 1..41: mol_type = other RNA
ttttaggtacgtttccaattggttgagcggtttgaggaggt

SEQ ID NO: 11890 - RNA, 32 nt, synthetic construct
  source 1..32: mol_type = other RNA
tttatttgttggtacgtttccaattggtttga

SEQ ID NO: 11891 - RNA, 33 nt, synthetic construct
  source 1..33: mol_type = other RNA
tttagggatttcccacttgaaatttgcgctgtt

SEQ ID NO: 11892 - RNA, 43 nt, synthetic construct
  source 1..43: mol_type = other RNA
ttttaggtatttcccacttgaaatttgcgcggtttgaggaggt

SEQ ID NO: 11893 - RNA, 33 nt, synthetic construct
  source 1..33: mol_type = other RNA
tacttcccacttgaaatttgcgcggtttgagga

SEQ ID NO: 11894 - RNA, 41 nt, synthetic construct
  source 1..41: mol_type = other RNA
aggtacttcccacttggtttgagtggtttgaggaggtggtg

SEQ ID NO: 11895 - RNA, 31 nt, synthetic construct
  source 1..31: mol_type = other RNA
attttggatactgtttccaattggttgagct

SEQ ID NO: 11896 - RNA, 42 nt, synthetic construct
  source 1..42: mol_type = other RNA
cagcagtaggtgctttatttaggatactgtttccacttggtt

SEQ ID NO: 11897 - RNA, 32 nt, synthetic construct
  source 1..32: mol_type = other RNA
aggtgctttatttaggatactgtttccacttg

SEQ ID NO: 11898 - RNA, 32 nt, synthetic construct
  source 1..32: mol_type = other RNA
tttaggtactttctgtttggtcttgagctgtt

SEQ ID NO: 11899 - RNA, 31 nt, synthetic construct
  source 1..31: mol_type = other RNA
atttttaggtaattccgacttggtttgagct

SEQ ID NO: 11900 - RNA, 31 nt, synthetic construct
  source 1..31: mol_type = other RNA
tttaggtaattccgacttggtttgtgctgtt

SEQ ID NO: 11901 - RNA, 32 nt, synthetic construct
  source 1..32: mol_type = other RNA
aggtgaaggtatttttcacgtattcccacttg

SEQ ID NO: 11902 - RNA, 33 nt, synthetic construct
  source 1..33: mol_type = other RNA
tttatttttagggaattttcatacttggtttga

SEQ ID NO: 11903 - RNA, 32 nt, synthetic construct
  source 1..32: mol_type = other RNA
atttttcggtacttcccacttggtcctgagct

SEQ ID NO: 11904 - RNA, 32 nt, synthetic construct
  source 1..32: mol_type = other RNA
tacttcccacttggtcctgagcggtttgagga

SEQ ID NO: 11905 - RNA, 31 nt, synthetic construct
  source 1..31: mol_type = other RNA
tttattattaggcgctttccacttggtttga

SEQ ID NO: 11906 - RNA, 41 nt, synthetic construct
  source 1..41: mol_type = other RNA
ttttaggtaattccccctaggtttgagcggtttgaggaggt

SEQ ID NO: 11907 - RNA, 31 nt, synthetic construct
  source 1..31: mol_type = other RNA
atttttaggtattttccaattcgtttgagct

SEQ ID NO: 11908 - RNA, 30 nt, synthetic construct
  source 1..30: mol_type = other RNA
tttatgttaggtattttccaattcgtttga

SEQ ID NO: 11909 - RNA, 31 nt, synthetic construct
  source 1..31: mol_type = other RNA
atttttaagtacttccgacttggtttgagct

SEQ ID NO: 11910 - RNA, 31 nt, synthetic construct
  source 1..31: mol_type = other RNA
tactttccacttcgtttgagtggtttgagga

SEQ ID NO: 11911 - RNA, 31 nt, synthetic construct
  source 1..31: mol_type = other RNA
tttaggtacgtttccaggccattgagctgtt

SEQ ID NO: 11912 - RNA, 41 nt, synthetic construct
  source 1..41: mol_type = other RNA
ctttatttggcggtacgtttccaggccattgagctgtttga

SEQ ID NO: 11913 - RNA, 40 nt, synthetic construct
  source 1..40: mol_type = other RNA
aggtactttccaggccattgagcggtttgaggaggtggtg

SEQ ID NO: 11914 - RNA, 32 nt, synthetic construct
  source 1..32: mol_type = other RNA
tttatttggcggtacgtttccaggccatttga

SEQ ID NO: 11915 - RNA, 31 nt, synthetic construct
  source 1..31: mol_type = other RNA
atttttaggcactttccactcggttcgagct

SEQ ID NO: 11916 - RNA, 31 nt, synthetic construct
  source 1..31: mol_type = other RNA
tttaggcactttccactcggttcgagctgtt

SEQ ID NO: 11917 - RNA, 41 nt, synthetic construct
  source 1..41: mol_type = other RNA
aggtactttccactcggttcgagtggtttcaggaggtggtg

SEQ ID NO: 11918 - RNA, 41 nt, synthetic construct
  source 1..41: mol_type = other RNA
ctttatttgggataccattgccgattggttgagctgtttga

SEQ ID NO: 11919 - RNA, 40 nt, synthetic construct
  source 1..40: mol_type = other RNA
aggtacttgccgattggttgagtggtttgagcaggtggtg

SEQ ID NO: 11920 - RNA, 30 nt, synthetic construct
  source 1..30: mol_type = other RNA
tttatttatagttactcccgacttctttga

SEQ ID NO: 11921 - RNA, 31 nt, synthetic construct
  source 1..31: mol_type = other RNA
tttaggtatttcccacttggattgaactgtt

SEQ ID NO: 11922 - RNA, 41 nt, synthetic construct
  source 1..41: mol_type = other RNA
ttttaggtatttcccacttggattgaacgtgttgaggaggt

SEQ ID NO: 11923 - RNA, 31 nt, synthetic construct
  source 1..31: mol_type = other RNA
tttattttgaggtatttcccacttggtttga

SEQ ID NO: 11924 - RNA, 31 nt, synthetic construct
  source 1..31: mol_type = other RNA
tacttcccacttggattgaacgtgttgagga

SEQ ID NO: 11925 - RNA, 43 nt, synthetic construct
  source 1..43: mol_type = other RNA
tttattcataggcgcttcccacacacacacacacttcgtttga

SEQ ID NO: 11926 - RNA, 47 nt, synthetic construct
  source 1..47: mol_type = other RNA
tacttcccacacacacacacacttcgttgttgagcgcgttttgagga

SEQ ID NO: 11927 - RNA, 45 nt, synthetic construct
  source 1..45: mol_type = other RNA
tttaggcacttccgtcttggttttaaaaaaattctacgagctgtt

SEQ ID NO: 11928 - RNA, 55 nt, synthetic construct
  source 1..55: mol_type = other RNA
ctttattttaaggcacttccgtcttggttttaaaaaaattctacgagctgtttga

SEQ ID NO: 11929 - RNA, 54 nt, synthetic construct
  source 1..54: mol_type = other RNA
aggtacttccgtcttggttttaaaaaaattctacgagagtattgataggtggtg

SEQ ID NO: 11930 - RNA, 45 nt, synthetic construct
  source 1..45: mol_type = other RNA
tacttccgtcttggttttaaaaaaattctacgagagtattgagga

SEQ ID NO: 11931 - RNA, 31 nt, synthetic construct
  source 1..31: mol_type = other RNA
tttattgttcggtagtttccacttcgtttga

SEQ ID NO: 11932 - RNA, 30 nt, synthetic construct
  source 1..30: mol_type = other RNA
tttattcctaggtaattcccactgatttga

SEQ ID NO: 11933 - RNA, 36 nt, synthetic construct
  source 1..36: mol_type = other RNA
aggtgctttatcttcgagggtctacttccgcacttg

SEQ ID NO: 11934 - RNA, 61 nt, synthetic construct
  source 1..61: mol_type = other RNA
ctttatttttgggtccatacaccacccccaccccaccccccacttggtttgagctgtttga

SEQ ID NO: 11935 - RNA, 41 nt, synthetic construct
  source 1..41: mol_type = other RNA
aggtacttcccacttggtttgagtggtttagggaggtggtg

SEQ ID NO: 11936 - RNA, 41 nt, synthetic construct
  source 1..41: mol_type = other RNA
ttttaggtacttcccacttggtttgagcggttcgaggaggt

SEQ ID NO: 11937 - RNA, 31 nt, synthetic construct
  source 1..31: mol_type = other RNA
tacttcccccttggtttgagcggtttgagga

SEQ ID NO: 11938 - RNA, 41 nt, synthetic construct
  source 1..41: mol_type = other RNA
aggtactttccaaatcgtttgagtggtttgaggaggtggtg

SEQ ID NO: 11939 - RNA, 31 nt, synthetic construct
  source 1..31: mol_type = other RNA
tactttccaaatcgtttgagtggtttgagga

SEQ ID NO: 11940 - RNA, 41 nt, synthetic construct
  source 1..41: mol_type = other RNA
aggtacttcccacttagtttgagtggttcgaggaggtggtg

SEQ ID NO: 11941 - RNA, 31 nt, synthetic construct
  source 1..31: mol_type = other RNA
atttttaggtacttcccacttgctttgagct

SEQ ID NO: 11942 - RNA, 31 nt, synthetic construct
  source 1..31: mol_type = other RNA
tttaggtacttcccacatggtttgagctgtt

SEQ ID NO: 11943 - RNA, 39 nt, synthetic construct
  source 1..39: mol_type = other RNA
tacttcccaaacttggtttcagtagcgtttgtttgagga

SEQ ID NO: 11944 - RNA, 41 nt, synthetic construct
  source 1..41: mol_type = other RNA
aggtacttccgaattggtttgagcgccttaaggaggtggtg

SEQ ID NO: 11945 - RNA, 41 nt, synthetic construct
  source 1..41: mol_type = other RNA
ttttaggtgcttccgaattggtttgagcgccttgaggaggt

SEQ ID NO: 11946 - RNA, 33 nt, synthetic construct
  source 1..33: mol_type = other RNA
atttttaggtattttcccggcatggtttgagct

SEQ ID NO: 11947 - RNA, 43 nt, synthetic construct
  source 1..43: mol_type = other RNA
ttttaggtattttcccggcatggtttggatggtttgaggaggt

SEQ ID NO: 11948 - RNA, 33 nt, synthetic construct
  source 1..33: mol_type = other RNA
tttatttttaggtattttcccggcatggtttga

SEQ ID NO: 11949 - RNA, 33 nt, synthetic construct
  source 1..33: mol_type = other RNA
tactttcccggcatggtttggttggtttgagga

SEQ ID NO: 11950 - RNA, 31 nt, synthetic construct
  source 1..31: mol_type = other RNA
atttttaggtacttcccacttggtctgagct

SEQ ID NO: 11951 - RNA, 31 nt, synthetic construct
  source 1..31: mol_type = other RNA
tttaggtacttcccacttggtctgagctgtt

SEQ ID NO: 11952 - RNA, 41 nt, synthetic construct
  source 1..41: mol_type = other RNA
ttttaggtacttcccacttggtctgagcggtttgaggaggt

SEQ ID NO: 11953 - RNA, 31 nt, synthetic construct
  source 1..31: mol_type = other RNA
atttttaggtacttcccccttggttagagct

SEQ ID NO: 11954 - RNA, 31 nt, synthetic construct
  source 1..31: mol_type = other RNA
tttaggtacttcccccttggttagagctgtt

SEQ ID NO: 11955 - RNA, 41 nt, synthetic construct
  source 1..41: mol_type = other RNA
aggtacttcccacttggtttgagcggtttaaggaggtggtg

SEQ ID NO: 11956 - RNA, 41 nt, synthetic construct
  source 1..41: mol_type = other RNA
ttttaggtaaatcccacttggtttgagcggtttgaggaggt

SEQ ID NO: 11957 - RNA, 31 nt, synthetic construct
  source 1..31: mol_type = other RNA
atttttaggtgtttcccaactggtttgagct

SEQ ID NO: 11958 - RNA, 41 nt, synthetic construct
  source 1..41: mol_type = other RNA
ttttaggtgtttcccaactggtttgagtggtttgaggaggt

SEQ ID NO: 11959 - RNA, 31 nt, synthetic construct
  source 1..31: mol_type = other RNA
tttatttttagatacatcccacttagtttga

SEQ ID NO: 11960 - RNA, 31 nt, synthetic construct
  source 1..31: mol_type = other RNA
tacttcccacttagtttgggcgttttgagga

SEQ ID NO: 11961 - RNA, 41 nt, synthetic construct
  source 1..41: mol_type = other RNA
ttttaggtaattccccctaggtttgagcggttggaggaggt

SEQ ID NO: 11962 - RNA, 31 nt, synthetic construct
  source 1..31: mol_type = other RNA
tttatttttaggtaattccccctaggtttga

SEQ ID NO: 11963 - RNA, 31 nt, synthetic construct
  source 1..31: mol_type = other RNA
tacttccccctaggtttgagcggttggagga

SEQ ID NO: 11964 - RNA, 31 nt, synthetic construct
  source 1..31: mol_type = other RNA
tttatttttaggcaattcccccttggtttga

SEQ ID NO: 11965 - RNA, 31 nt, synthetic construct
  source 1..31: mol_type = other RNA
tttatttttagacgcttcccccttggtttga

SEQ ID NO: 11966 - RNA, 31 nt, synthetic construct
  source 1..31: mol_type = other RNA
atttttaggtccttcccccttggtgtgagct

SEQ ID NO: 11967 - RNA, 31 nt, synthetic construct
  source 1..31: mol_type = other RNA
atttttaggtattccccactgggtttgagct

SEQ ID NO: 11968 - RNA, 31 nt, synthetic construct
  source 1..31: mol_type = other RNA
tttaggtattccccactgggtttgagctgtt

SEQ ID NO: 11969 - RNA, 41 nt, synthetic construct
  source 1..41: mol_type = other RNA
ttttaggtacttcccacttggtatgagaggtttgaggaggt

SEQ ID NO: 11970 - RNA, 31 nt, synthetic construct
  source 1..31: mol_type = other RNA
tttaggtgtttcccaatcagtttcagctgtt

SEQ ID NO: 11971 - RNA, 41 nt, synthetic construct
  source 1..41: mol_type = other RNA
ttttaggtcctttcgacttggtttgagtggtttgaggaggt

SEQ ID NO: 11972 - RNA, 31 nt, synthetic construct
  source 1..31: mol_type = other RNA
tttaggtgcttccctcctggtttgacctgtt

SEQ ID NO: 11973 - RNA, 31 nt, synthetic construct
  source 1..31: mol_type = other RNA
tacttccctcctggtttgaccggtttgagga

SEQ ID NO: 11974 - RNA, 41 nt, synthetic construct
  source 1..41: mol_type = other RNA
ttttaggtatttcccacttggtttgagcggttcgaggaggt

SEQ ID NO: 11975 - RNA, 31 nt, synthetic construct
  source 1..31: mol_type = other RNA
tactttccacctggtttgagcggttcgagga

SEQ ID NO: 11976 - RNA, 31 nt, synthetic construct
  source 1..31: mol_type = other RNA
tttaggtactttccacttggtttgagctgtt

SEQ ID NO: 11977 - RNA, 31 nt, synthetic construct
  source 1..31: mol_type = other RNA
tactttccacttggtttgagcggtttgagga

SEQ ID NO: 11978 - RNA, 30 nt, synthetic construct
  source 1..30: mol_type = other RNA
tttattttaggtatttcccacttggtttga

SEQ ID NO: 11979 - RNA, 32 nt, synthetic construct
  source 1..32: mol_type = other RNA
attttagaacacaactccacttggattgagct

SEQ ID NO: 11980 - RNA, 33 nt, synthetic construct
  source 1..33: mol_type = other RNA
tttagtacacaactccacttggattgagctgtt

SEQ ID NO: 11981 - RNA, 31 nt, synthetic construct
  source 1..31: mol_type = other RNA
atttttaggtactatccaattggttcgagct

SEQ ID NO: 11982 - RNA, 41 nt, synthetic construct
  source 1..41: mol_type = other RNA
ttttaggtactatccaattggttcctagggttcgaggaggt

SEQ ID NO: 11983 - RNA, 41 nt, synthetic construct
  source 1..41: mol_type = other RNA
ttttaggtgttttccacttggtttgagtggtttgaggaggt

SEQ ID NO: 11984 - RNA, 31 nt, synthetic construct
  source 1..31: mol_type = other RNA
tactttccacttggtttgagtggtttgagga

SEQ ID NO: 11985 - RNA, 31 nt, synthetic construct
  source 1..31: mol_type = other RNA
tacttcccacgttgtttgagcggttcgagga

SEQ ID NO: 11986 - RNA, 31 nt, synthetic construct
  source 1..31: mol_type = other RNA
tttatttttagtaactttccacttagtttga

SEQ ID NO: 11987 - RNA, 31 nt, synthetic construct
  source 1..31: mol_type = other RNA
tttaggtacttcccacttggttagagctgtt

SEQ ID NO: 11988 - RNA, 41 nt, synthetic construct
  source 1..41: mol_type = other RNA
aggtacttcccacttggtttgggcgggttgagaaggtggtg

SEQ ID NO: 11989 - RNA, 31 nt, synthetic construct
  source 1..31: mol_type = other RNA
tttaggtgttttccaattggattgagctgtt

SEQ ID NO: 11990 - RNA, 41 nt, synthetic construct
  source 1..41: mol_type = other RNA
ttttaggtgttttccaattggattgagtgatttgaggaggt

SEQ ID NO: 11991 - RNA, 31 nt, synthetic construct
  source 1..31: mol_type = other RNA
atttttaggtatcttccacttggtttgagct

SEQ ID NO: 11992 - RNA, 31 nt, synthetic construct
  source 1..31: mol_type = other RNA
tttaggtatcttccacttggtttgagctgtt

SEQ ID NO: 11993 - RNA, 41 nt, synthetic construct
  source 1..41: mol_type = other RNA
ttttaggtacttttccaattggttgagcggtttgaggaggt

SEQ ID NO: 11994 - RNA, 30 nt, synthetic construct
  source 1..30: mol_type = other RNA
tactttccacttggttggacgcttagagga

SEQ ID NO: 11995 - RNA, 33 nt, synthetic construct
  source 1..33: mol_type = other RNA
tacttcccactaggtttatagtaggttcgagga

SEQ ID NO: 11996 - RNA, 47 nt, synthetic construct
  source 1..47: mol_type = other RNA
atttttatgtactttaaaaaccaaggttaaatatatgcatttgagct

SEQ ID NO: 11997 - RNA, 31 nt, synthetic construct
  source 1..31: mol_type = other RNA
tttattattagataactccaacttggtttga

SEQ ID NO: 11998 - RNA, 31 nt, synthetic construct
  source 1..31: mol_type = other RNA
tacttcccacctggtttgagcggtttgagga

SEQ ID NO: 11999 - RNA, 33 nt, synthetic construct
  source 1..33: mol_type = other RNA
attttaaggtacttcccagacttgatttgagct

SEQ ID NO: 12000 - RNA, 33 nt, synthetic construct
  source 1..33: mol_type = other RNA
tttaggtacttcccagacttgatttgagctgtt

SEQ ID NO: 12001 - RNA, 33 nt, synthetic construct
  source 1..33: mol_type = other RNA
tttagattctctccacttggtttgctggctgtt

SEQ ID NO: 12002 - RNA, 43 nt, synthetic construct
  source 1..43: mol_type = other RNA
ctttatttttagattctctccacttggtttgctggctgtttga

SEQ ID NO: 12003 - RNA, 36 nt, synthetic construct
  source 1..36: mol_type = other RNA
tactttccacttggtttgctggcgtcagtcggagga

SEQ ID NO: 12004 - RNA, 42 nt, synthetic construct
  source 1..42: mol_type = other RNA
tacttcccacttgcattgagcgccaaatcttggttctgagga

SEQ ID NO: 12005 - RNA, 41 nt, synthetic construct
  source 1..41: mol_type = other RNA
ttttaggtactttccccttggttcgagtgctttgaggaggt

SEQ ID NO: 12006 - RNA, 31 nt, synthetic construct
  source 1..31: mol_type = other RNA
tttattgttaggcactttccccttggtttga

SEQ ID NO: 12007 - RNA, 35 nt, synthetic construct
  source 1..35: mol_type = other RNA
tttaggtacttgccacaggaaaggtttgagctgtt

SEQ ID NO: 12008 - RNA, 31 nt, synthetic construct
  source 1..31: mol_type = other RNA
tttatctttaggtgcttccctcttggtttga

SEQ ID NO: 12009 - RNA, 31 nt, synthetic construct
  source 1..31: mol_type = other RNA
tttattttgcgggatttcccacttggtttga

SEQ ID NO: 12010 - RNA, 31 nt, synthetic construct
  source 1..31: mol_type = other RNA
tttaggtacctcccacttggttcgagctgtt

SEQ ID NO: 12011 - RNA, 31 nt, synthetic construct
  source 1..31: mol_type = other RNA
atttttgggtatttccctcctggtttgagct

SEQ ID NO: 12012 - RNA, 41 nt, synthetic construct
  source 1..41: mol_type = other RNA
ttttaggtatttccctcctggtttgagcggtttgaggaggt

SEQ ID NO: 12013 - RNA, 44 nt, synthetic construct
  source 1..44: mol_type = other RNA
atttttaggtactgtgagctatgaccagggtcctgttttgagct

SEQ ID NO: 12014 - RNA, 44 nt, synthetic construct
  source 1..44: mol_type = other RNA
tttaggtactgtgagctatgaccagggtcctgttttgatctgtt

SEQ ID NO: 12015 - RNA, 45 nt, synthetic construct
  source 1..45: mol_type = other RNA
tttattttgttaggtactgtgagctatgaccagggtcctgtttga

SEQ ID NO: 12016 - RNA, 31 nt, synthetic construct
  source 1..31: mol_type = other RNA
tttaggtgcttccctcttggtttgagctgtt

SEQ ID NO: 12017 - RNA, 41 nt, synthetic construct
  source 1..41: mol_type = other RNA
ctttatttgttggtacgtttccaattggttgagctgtttga

SEQ ID NO: 12018 - RNA, 41 nt, synthetic construct
  source 1..41: mol_type = other RNA
aggtacttccctcctggtttgagcggtttgaggaggtggtg

SEQ ID NO: 12019 - RNA, 31 nt, synthetic construct
  source 1..31: mol_type = other RNA
tttattctttgggatttcccacttgatttga

SEQ ID NO: 12020 - RNA, 42 nt, synthetic construct
  source 1..42: mol_type = other RNA
ttttaggtactgtttccaattggttgagcggtttgaggaggt

SEQ ID NO: 12021 - RNA, 32 nt, synthetic construct
  source 1..32: mol_type = other RNA
tttatttaggatactgtttccaattggtttga

SEQ ID NO: 12022 - RNA, 42 nt, synthetic construct
  source 1..42: mol_type = other RNA
ctttatttttcggtactttctgtttggtcttgagctgtttga

SEQ ID NO: 12023 - RNA, 42 nt, synthetic construct
  source 1..42: mol_type = other RNA
ttttaggtactttctgtttggtcttgagtggtttgaggaggt

SEQ ID NO: 12024 - RNA, 31 nt, synthetic construct
  source 1..31: mol_type = other RNA
tttatttttcggtactttctgtttggtttga

SEQ ID NO: 12025 - RNA, 32 nt, synthetic construct
  source 1..32: mol_type = other RNA
tactttctgtttggtcttgagtggtttgagga

SEQ ID NO: 12026 - RNA, 31 nt, synthetic construct
  source 1..31: mol_type = other RNA
atttttacgtacttcaccctcggtttgagct

SEQ ID NO: 12027 - RNA, 33 nt, synthetic construct
  source 1..33: mol_type = other RNA
tttagggaattttcatacttggtacatcctgtt

SEQ ID NO: 12028 - RNA, 44 nt, synthetic construct
  source 1..44: mol_type = other RNA
aggtactttcatacttggtacatcgggtttgatgggaggtggtg

SEQ ID NO: 12029 - RNA, 42 nt, synthetic construct
  source 1..42: mol_type = other RNA
ttttaggtattttcatacttggtacatcgggtttgaggaggt

SEQ ID NO: 12030 - RNA, 42 nt, synthetic construct
  source 1..42: mol_type = other RNA
ttttaggtacttcccacttggtcctgagcggtttgaggaggt

SEQ ID NO: 12031 - RNA, 31 nt, synthetic construct
  source 1..31: mol_type = other RNA
tttaggcgctttccacttggttcaagctgtt

SEQ ID NO: 12032 - RNA, 41 nt, synthetic construct
  source 1..41: mol_type = other RNA
aggtactttccacttggttcaagtggtttcaggaggtggtg

SEQ ID NO: 12033 - RNA, 31 nt, synthetic construct
  source 1..31: mol_type = other RNA
tactttccacttggttcaagtggtttgagga

SEQ ID NO: 12034 - RNA, 31 nt, synthetic construct
  source 1..31: mol_type = other RNA
tttatttctaggtaattccccctaggtttga

SEQ ID NO: 12035 - RNA, 31 nt, synthetic construct
  source 1..31: mol_type = other RNA
aggtgcatttgagttaggtattttccacttg

SEQ ID NO: 12036 - RNA, 31 nt, synthetic construct
  source 1..31: mol_type = other RNA
atttttcggtacgtttccaagcaattgagct

SEQ ID NO: 12037 - RNA, 31 nt, synthetic construct
  source 1..31: mol_type = other RNA
tttaggtacgtttccaagcaattgagctgtt

SEQ ID NO: 12038 - RNA, 40 nt, synthetic construct
  source 1..40: mol_type = other RNA
aggtactttccaagcaattgagcggtttgaggaggtggtg

SEQ ID NO: 12039 - RNA, 41 nt, synthetic construct
  source 1..41: mol_type = other RNA
ttttaggtacgtttccaagcaattgagcggtttgaggaggt

SEQ ID NO: 12040 - RNA, 32 nt, synthetic construct
  source 1..32: mol_type = other RNA
tttatttgtcggtacgtttccaagcaatttga

SEQ ID NO: 12041 - RNA, 31 nt, synthetic construct
  source 1..31: mol_type = other RNA
attttgcggtacgtttccaggccattgagct

SEQ ID NO: 12042 - RNA, 41 nt, synthetic construct
  source 1..41: mol_type = other RNA
ttttaggtacgtttccaggccattgagcggtttgaggaggt

SEQ ID NO: 12043 - RNA, 31 nt, synthetic construct
  source 1..31: mol_type = other RNA
tttattattaggcactttccactcggtttga

SEQ ID NO: 12044 - RNA, 31 nt, synthetic construct
  source 1..31: mol_type = other RNA
tttatctttggtaacttcccactaggtttga

SEQ ID NO: 12045 - RNA, 42 nt, synthetic construct
  source 1..42: mol_type = other RNA
ttttaggtaccattgccgattggttgagtggtttgaggaggt

SEQ ID NO: 12046 - RNA, 29 nt, synthetic construct
  source 1..29: mol_type = other RNA
atttttagttactcccgacttcttgagct

SEQ ID NO: 12047 - RNA, 39 nt, synthetic construct
  source 1..39: mol_type = other RNA
atttttagagcattcccacttggttctcctgcttgagct

SEQ ID NO: 12048 - RNA, 39 nt, synthetic construct
  source 1..39: mol_type = other RNA
tttagagcattcccacttggttctcctgcttgagctgtt

SEQ ID NO: 12049 - RNA, 31 nt, synthetic construct
  source 1..31: mol_type = other RNA
atttttgggtactttcctattgggttgagct

SEQ ID NO: 12050 - RNA, 41 nt, synthetic construct
  source 1..41: mol_type = other RNA
ctttatttttgggtactttcctattgggttgagctgtttga

SEQ ID NO: 12051 - RNA, 41 nt, synthetic construct
  source 1..41: mol_type = other RNA
ttttaggtactttcctattgggttgagcggtttgaggaggt

SEQ ID NO: 12052 - RNA, 31 nt, synthetic construct
  source 1..31: mol_type = other RNA
tttatacttgggtactttcctattggtttga

SEQ ID NO: 12053 - RNA, 31 nt, synthetic construct
  source 1..31: mol_type = other RNA
tactttcctattgggttgagcggtttgagga

SEQ ID NO: 12054 - RNA, 31 nt, synthetic construct
  source 1..31: mol_type = other RNA
attttaaggcacttccgtcttggtttgagct

SEQ ID NO: 12055 - RNA, 29 nt, synthetic construct
  source 1..29: mol_type = other RNA
tactttccacttcgtttgaggtttgagga

SEQ ID NO: 12056 - RNA, 51 nt, synthetic construct
  source 1..51: mol_type = other RNA
atttttgggtccatacaccacccccaccccaccccccacttggtttgagct

SEQ ID NO: 12057 - RNA, 60 nt, synthetic construct
  source 1..60: mol_type = other RNA
taggtgcttttttttgggtccatacaccacccccaccccaccccccacttggtttgagct

SEQ ID NO: 12058 - RNA, 41 nt, synthetic construct
  source 1..41: mol_type = other RNA
aggtacttcccacttggtatgagtggtttggggaggtggtg

SEQ ID NO: 12059 - RNA, 31 nt, synthetic construct
  source 1..31: mol_type = other RNA
tacttccgaattggtttgagcgccttgagga

SEQ ID NO: 12060 - RNA, 31 nt, synthetic construct
  source 1..31: mol_type = other RNA
tttatttttaggtacttcccccttggtttga

SEQ ID NO: 12061 - RNA, 31 nt, synthetic construct
  source 1..31: mol_type = other RNA
atttttagacagttcccactaggtttgagct

SEQ ID NO: 12062 - RNA, 41 nt, synthetic construct
  source 1..41: mol_type = other RNA
ttttaggtaattcccaattggttcaagcggttcgaggaggt

SEQ ID NO: 12063 - RNA, 31 nt, synthetic construct
  source 1..31: mol_type = other RNA
tacttcccaattggttcaagcggttcgagga

SEQ ID NO: 12064 - RNA, 32 nt, synthetic construct
  source 1..32: mol_type = other RNA
tacttcccccttggttttgagcggtttgagga

SEQ ID NO: 12065 - RNA, 31 nt, synthetic construct
  source 1..31: mol_type = other RNA
atttttaggtgtttcccaatcagtttgagct

SEQ ID NO: 12066 - RNA, 31 nt, synthetic construct
  source 1..31: mol_type = other RNA
atttttaggtactttccacctggtttgagct

SEQ ID NO: 12067 - RNA, 31 nt, synthetic construct
  source 1..31: mol_type = other RNA
tttattcttaggtactttccacttggtttga

SEQ ID NO: 12068 - RNA, 32 nt, synthetic construct
  source 1..32: mol_type = other RNA
tttattttagaacacaactccacttggtttga

SEQ ID NO: 12069 - RNA, 32 nt, synthetic construct
  source 1..32: mol_type = other RNA
tttaggtactatccaattggttcctagctgtt

SEQ ID NO: 12070 - RNA, 41 nt, synthetic construct
  source 1..41: mol_type = other RNA
aggtactttccaattggttcctagggttcaaggaggtggtg

SEQ ID NO: 12071 - RNA, 28 nt, synthetic construct
  source 1..28: mol_type = other RNA
aggtgttttattccgtagatcccacttg

SEQ ID NO: 12072 - RNA, 41 nt, synthetic construct
  source 1..41: mol_type = other RNA
ttttaggtatcttccacttggtttgagcggtttgaggaggt

SEQ ID NO: 12073 - RNA, 44 nt, synthetic construct
  source 1..44: mol_type = other RNA
taggtgctttatttttatgtactttaaaaaccaaggtttgagct

SEQ ID NO: 12074 - RNA, 31 nt, synthetic construct
  source 1..31: mol_type = other RNA
atttttagataactccaacttggtttgagct

SEQ ID NO: 12075 - RNA, 31 nt, synthetic construct
  source 1..31: mol_type = other RNA
tttatttgtgggtattttccacttggtttga

SEQ ID NO: 12076 - RNA, 31 nt, synthetic construct
  source 1..31: mol_type = other RNA
tttaggtgttacccacttcgtttgagctgtt

SEQ ID NO: 12077 - RNA, 41 nt, synthetic construct
  source 1..41: mol_type = other RNA
cagcagtacgtgctctatcgttagattctctccacttggtt

SEQ ID NO: 12078 - RNA, 41 nt, synthetic construct
  source 1..41: mol_type = other RNA
aggtacttcccacttggttcgagcggtttgcgaaggtggtg

SEQ ID NO: 12079 - RNA, 41 nt, synthetic construct
  source 1..41: mol_type = other RNA
aggtacttccctcctggtttgagcggtttgagaaggtggtg

SEQ ID NO: 12080 - RNA, 31 nt, synthetic construct
  source 1..31: mol_type = other RNA
tacttccctcctggtttgagcggtttgagga

SEQ ID NO: 12081 - RNA, 41 nt, synthetic construct
  source 1..41: mol_type = other RNA
ttttaggtgcttccctcttggtttgagaggttagaggaggt

SEQ ID NO: 12082 - RNA, 42 nt, synthetic construct
  source 1..42: mol_type = other RNA
aggtactttctgtttggtcttgagtggtttgaggaggtggtg

SEQ ID NO: 12083 - RNA, 33 nt, synthetic construct
  source 1..33: mol_type = other RNA
atttttagggaattttcatacttggtacgagct

SEQ ID NO: 12084 - RNA, 31 nt, synthetic construct
  source 1..31: mol_type = other RNA
tacttccccctaggtttgagcggtttgagga

SEQ ID NO: 12085 - RNA, 41 nt, synthetic construct
  source 1..41: mol_type = other RNA
ctttatttgtcggtacgtttccaagcaattgagctgtttga

SEQ ID NO: 12086 - RNA, 31 nt, synthetic construct
  source 1..31: mol_type = other RNA
tactttccactcggttcgagtggtttgagga

SEQ ID NO: 12087 - RNA, 32 nt, synthetic construct
  source 1..32: mol_type = other RNA
tttatttgggataccattgccgattggtttga

SEQ ID NO: 12088 - RNA, 30 nt, synthetic construct
  source 1..30: mol_type = other RNA
tacttgccgattggttgagtggtttgagga

SEQ ID NO: 12089 - RNA, 55 nt, synthetic construct
  source 1..55: mol_type = other RNA
ttttaggtacttccgtcttggttttaaaaaaattctacgagagtattgaggaggt

SEQ ID NO: 12090 - RNA, 51 nt, synthetic construct
  source 1..51: mol_type = other RNA
tttaggtccatacaccacccccaccccaccccccacttggtttgagctgtt

SEQ ID NO: 12091 - RNA, 41 nt, synthetic construct
  source 1..41: mol_type = other RNA
atgccttccaggttgcggactttgaaccccattccacagcc

SEQ ID NO: 12092 - RNA, 41 nt, synthetic construct
  source 1..41: mol_type = other RNA
ctgtgggccaggatgtcttcaacgttgaggactttgcaccc

SEQ ID NO: 12093 - RNA, 41 nt, synthetic construct
  source 1..41: mol_type = other RNA
ctgtgggccaggatgcctgccactttgcggactttgcaccc

SEQ ID NO: 12094 - RNA, 41 nt, synthetic construct
  source 1..41: mol_type = other RNA
ctgtgggccaggatgccttacatgccgcggactttgcaccc

SEQ ID NO: 12095 - RNA, 41 nt, synthetic construct
  source 1..41: mol_type = other RNA
ctgtgggccaggatgcctcccacgatgtggactttgcaccc

SEQ ID NO: 12096 - RNA, 41 nt, synthetic construct
  source 1..41: mol_type = other RNA
ctgtgggccaggatgccttccacggtgcggactttgcaccc

SEQ ID NO: 12097 - RNA, 41 nt, synthetic construct
  source 1..41: mol_type = other RNA
ctgtgggccaggatgcctcccatgttgcggactttgcaccc

SEQ ID NO: 12098 - RNA, 41 nt, synthetic construct
  source 1..41: mol_type = other RNA
ctgtgggccaggatggcttccccgctgcggactttgcaccc

SEQ ID NO: 12099 - RNA, 41 nt, synthetic construct
  source 1..41: mol_type = other RNA
ctgtgggccaagatgccttccactttgcggactttgcaccc

SEQ ID NO: 12100 - RNA, 41 nt, synthetic construct
  source 1..41: mol_type = other RNA
ctgtgggccagaatgccttctacgttgcggactttgcaccc

SEQ ID NO: 12101 - RNA, 41 nt, synthetic construct
  source 1..41: mol_type = other RNA
atgccttccatgttgcggactttgcatccaattccacagcc

SEQ ID NO: 12102 - RNA, 41 nt, synthetic construct
  source 1..41: mol_type = other RNA
ctgtgggccaggatgccttctacgttgcggactttgcaccc

SEQ ID NO: 12103 - RNA, 41 nt, synthetic construct
  source 1..41: mol_type = other RNA
ctgtgggccaggatgccttctacgttgtggactttgcaccc

SEQ ID NO: 12104 - RNA, 41 nt, synthetic construct
  source 1..41: mol_type = other RNA
ctgtgggccagaatgcctttaacgttgtggactttgcaccc

SEQ ID NO: 12105 - RNA, 41 nt, synthetic construct
  source 1..41: mol_type = other RNA
atgccttccacgttgcggactttgaacccaattccacagcc

SEQ ID NO: 12106 - RNA, 41 nt, synthetic construct
  source 1..41: mol_type = other RNA
ctgtgggccagaatgccttcgacgttgcggactttgcaccc

SEQ ID NO: 12107 - RNA, 41 nt, synthetic construct
  source 1..41: mol_type = other RNA
atgccttccacgttgtggactttgtacctatttccacagcc

SEQ ID NO: 12108 - RNA, 41 nt, synthetic construct
  source 1..41: mol_type = other RNA
ctgtgggccaggatgcctttcacgttgcggactttgcaccc

SEQ ID NO: 12109 - RNA, 31 nt, synthetic construct
  source 1..31: mol_type = other RNA
tgctgactttagctaccattccccagcctgg

SEQ ID NO: 12110 - RNA, 31 nt, synthetic construct
  source 1..31: mol_type = other RNA
ccaggatgcccttcacgttgcggactttgca

SEQ ID NO: 12111 - RNA, 40 nt, synthetic construct
  source 1..40: mol_type = other RNA
ctgtgggccagatgccttcaacgttgcggactttgcaccc

SEQ ID NO: 12112 - RNA, 41 nt, synthetic construct
  source 1..41: mol_type = other RNA
atgccttccacgccgcggactttgcaccccattccacagcc

SEQ ID NO: 12113 - RNA, 41 nt, synthetic construct
  source 1..41: mol_type = other RNA
ctgtgggccaggatgcacttcaccttgcggactttgcaccc

SEQ ID NO: 12114 - RNA, 41 nt, synthetic construct
  source 1..41: mol_type = other RNA
atgccttccacgttgtggactttgccaacaattccacagcc

SEQ ID NO: 12115 - RNA, 41 nt, synthetic construct
  source 1..41: mol_type = other RNA
atgccttccacgttgcggacttcgcaccccattccacagcc

SEQ ID NO: 12116 - RNA, 40 nt, synthetic construct
  source 1..40: mol_type = other RNA
gccaggatgccttccacgttgtggactttgacccaattcc

SEQ ID NO: 12117 - RNA, 41 nt, synthetic construct
  source 1..41: mol_type = other RNA
ctgtgggccaggatgcattccacgccgcggactttgcaccc

SEQ ID NO: 12118 - RNA, 41 nt, synthetic construct
  source 1..41: mol_type = other RNA
ctgtgggccaggatgccttatacgttgtggactttgcaccc

SEQ ID NO: 12119 - RNA, 41 nt, synthetic construct
  source 1..41: mol_type = other RNA
atgccttccacgtagcggactttgcagccaatcccacagcc

SEQ ID NO: 12120 - RNA, 41 nt, synthetic construct
  source 1..41: mol_type = other RNA
ctgtgggccaggatgtcttccacgttgtggactttgcaccc

SEQ ID NO: 12121 - RNA, 41 nt, synthetic construct
  source 1..41: mol_type = other RNA
ctgtgggccaggaggccttcacacttgcggactttgcaccc

SEQ ID NO: 12122 - RNA, 41 nt, synthetic construct
  source 1..41: mol_type = other RNA
ctgtgggcccggatgccttacatgttgcggactttgcaccc

SEQ ID NO: 12123 - RNA, 41 nt, synthetic construct
  source 1..41: mol_type = other RNA
ctgtgggccaaaatgccttccaagttgcggactttgcaccc

SEQ ID NO: 12124 - RNA, 41 nt, synthetic construct
  source 1..41: mol_type = other RNA
atgccttccacgttgcggactttgcaaaccattccacagcc

SEQ ID NO: 12125 - RNA, 41 nt, synthetic construct
  source 1..41: mol_type = other RNA
ctgtgggccaggatgcctttcaacttgcggactttgcaccc

SEQ ID NO: 12126 - RNA, 41 nt, synthetic construct
  source 1..41: mol_type = other RNA
ctgtgggccaggatgccttccacgttcaggactttgcaccc

SEQ ID NO: 12127 - RNA, 41 nt, synthetic construct
  source 1..41: mol_type = other RNA
ctgtgggccaagatgccttcgacgaagtggactttgcaccc

SEQ ID NO: 12128 - RNA, 41 nt, synthetic construct
  source 1..41: mol_type = other RNA
ctgtgggccaggatgccttccctgttgaggactttgcaccc

SEQ ID NO: 12129 - RNA, 41 nt, synthetic construct
  source 1..41: mol_type = other RNA
ctgtgggccaggatgcactccaccttgcggactttgcaccc

SEQ ID NO: 12130 - RNA, 41 nt, synthetic construct
  source 1..41: mol_type = other RNA
ctgtgggccaggatgcctcacacgttgcggactttgcaccc

SEQ ID NO: 12131 - RNA, 41 nt, synthetic construct
  source 1..41: mol_type = other RNA
ctgtgggccaagatgcctttcacgatgtggactttgcaccc

SEQ ID NO: 12132 - RNA, 41 nt, synthetic construct
  source 1..41: mol_type = other RNA
ctgtgggccaggctgccttccacgttgtggactttgcaccc

SEQ ID NO: 12133 - RNA, 41 nt, synthetic construct
  source 1..41: mol_type = other RNA
ctgtgggccaggatgcattccacgttgcggactttgcaccc

SEQ ID NO: 12134 - RNA, 40 nt, synthetic construct
  source 1..40: mol_type = other RNA
ctgtgggccaggatgccttccatgtgcggaccttgcaccc

SEQ ID NO: 12135 - RNA, 41 nt, synthetic construct
  source 1..41: mol_type = other RNA
atgccttccacgttgtggactttgcacccgcctccacagcc

SEQ ID NO: 12136 - RNA, 41 nt, synthetic construct
  source 1..41: mol_type = other RNA
ctgtgggccaggatgcccttcacgttgcggactttgcaccc

SEQ ID NO: 12137 - RNA, 41 nt, synthetic construct
  source 1..41: mol_type = other RNA
ctgtgggccaggatgcatttcacgtagcggactttgcaccc

SEQ ID NO: 12138 - RNA, 41 nt, synthetic construct
  source 1..41: mol_type = other RNA
ctgtgggccaggacgccttccacgttgcggactttgcaccc

SEQ ID NO: 12139 - RNA, 41 nt, synthetic construct
  source 1..41: mol_type = other RNA
ctgtgggccaggatgcaccacacgcggcggactttgcaccc

SEQ ID NO: 12140 - RNA, 41 nt, synthetic construct
  source 1..41: mol_type = other RNA
gccaggatgccttccacgttgcggactttggttccaattcc

SEQ ID NO: 12141 - RNA, 41 nt, synthetic construct
  source 1..41: mol_type = other RNA
ctgtgggccagtatgccttccttgttgcggactttgcaccc

SEQ ID NO: 12142 - RNA, 41 nt, synthetic construct
  source 1..41: mol_type = other RNA
ctgtgggccaggttgccctcgacgtagcggactttgcaccc

SEQ ID NO: 12143 - RNA, 41 nt, synthetic construct
  source 1..41: mol_type = other RNA
atgccttccctgttgaggactttgcatcctgttccacagcc

SEQ ID NO: 12144 - RNA, 41 nt, synthetic construct
  source 1..41: mol_type = other RNA
gccaggatgccttcgacgaagtggactttgcacccaattcc

SEQ ID NO: 12145 - RNA, 41 nt, synthetic construct
  source 1..41: mol_type = other RNA
atgccttctacgttgcggactttgcacacaattccacagcc

SEQ ID NO: 12146 - RNA, 41 nt, synthetic construct
  source 1..41: mol_type = other RNA
ctgtgggccaggatgccttccggcttgcggactttgcaccc

SEQ ID NO: 12147 - RNA, 43 nt, synthetic construct
  source 1..43: mol_type = other RNA
gccaggatgcctgccactttgcggactttagctacccaattcc

SEQ ID NO: 12148 - RNA, 41 nt, synthetic construct
  source 1..41: mol_type = other RNA
ctgtgggccaggatggcttcccacgtgcggactttgcaccc

SEQ ID NO: 12149 - RNA, 41 nt, synthetic construct
  source 1..41: mol_type = other RNA
ctgtgggccaggatgcctcgactagtgcggactttgcaccc

SEQ ID NO: 12150 - RNA, 41 nt, synthetic construct
  source 1..41: mol_type = other RNA
ctgtgggccaggatgccttacacgttgtggactttgcaccc

SEQ ID NO: 12151 - RNA, 41 nt, synthetic construct
  source 1..41: mol_type = other RNA
atgccttccacgatgtggactttgcactcaattccacagcc

SEQ ID NO: 12152 - RNA, 41 nt, synthetic construct
  source 1..41: mol_type = other RNA
atgccttccacgttgcggactttgcaccctgttccacagcc

SEQ ID NO: 12153 - RNA, 41 nt, synthetic construct
  source 1..41: mol_type = other RNA
gccaggatgccttccatgttgcggactttgcatccaattcc

SEQ ID NO: 12154 - RNA, 41 nt, synthetic construct
  source 1..41: mol_type = other RNA
ctgtgggccaggatgtcttccacgttgcggactttgcaccc

SEQ ID NO: 12155 - RNA, 41 nt, synthetic construct
  source 1..41: mol_type = other RNA
ctgtgggcgagaatgccttcaacgtcgcggactttgcaccc

SEQ ID NO: 12156 - RNA, 42 nt, synthetic construct
  source 1..42: mol_type = other RNA
atgccttccacgattgcggactttgctcagtcttccacagcc

SEQ ID NO: 12157 - RNA, 41 nt, synthetic construct
  source 1..41: mol_type = other RNA
gccaggatgccttccacgttgcggactttgaatccaattcc

SEQ ID NO: 12158 - RNA, 41 nt, synthetic construct
  source 1..41: mol_type = other RNA
atgccttccacgttgtggactttgtacatatttccacagcc

SEQ ID NO: 12159 - RNA, 41 nt, synthetic construct
  source 1..41: mol_type = other RNA
ctgtgggccatgatgccttccacgttgaggactttgcaccc

SEQ ID NO: 12160 - RNA, 41 nt, synthetic construct
  source 1..41: mol_type = other RNA
ctgtgggccaggaggccttaccacctgcggactttgcaccc

SEQ ID NO: 12161 - RNA, 41 nt, synthetic construct
  source 1..41: mol_type = other RNA
ctgtgggccaggatgcctaccccgttgcggactttgcaccc

SEQ ID NO: 12162 - RNA, 41 nt, synthetic construct
  source 1..41: mol_type = other RNA
atgccttctacgttgtggactttgcacccagttccacagcc

SEQ ID NO: 12163 - RNA, 31 nt, synthetic construct
  source 1..31: mol_type = other RNA
ccaggatgtcttccacgttgcggactttgca

SEQ ID NO: 12164 - RNA, 31 nt, synthetic construct
  source 1..31: mol_type = other RNA
ccaggatgccttccatgttgcggactttgca

SEQ ID NO: 12165 - RNA, 40 nt, synthetic construct
  source 1..40: mol_type = other RNA
ctgtgggccaggatgcctttccgttgtggactttgcaccc

SEQ ID NO: 12166 - RNA, 41 nt, synthetic construct
  source 1..41: mol_type = other RNA
ctgtgggccaggctgccttccatgttgcggactttgcaccc

SEQ ID NO: 12167 - RNA, 41 nt, synthetic construct
  source 1..41: mol_type = other RNA
ctgtgggccaaaatgccttccacgttgtggactttgcaccc

SEQ ID NO: 12168 - RNA, 46 nt, synthetic construct
  source 1..46: mol_type = other RNA
atgccttccacgttgtggacttcgcatcaaacccaattccacagcc

SEQ ID NO: 12169 - RNA, 41 nt, synthetic construct
  source 1..41: mol_type = other RNA
atgccttccccgttgcggactttatacccaattccacagcc

SEQ ID NO: 12170 - RNA, 41 nt, synthetic construct
  source 1..41: mol_type = other RNA
atgccttccacgttgtggactttgcacaacattccacagcc

SEQ ID NO: 12171 - RNA, 41 nt, synthetic construct
  source 1..41: mol_type = other RNA
ctgtgggccaggatgcatttcacgttgtggactttgcaccc

SEQ ID NO: 12172 - RNA, 41 nt, synthetic construct
  source 1..41: mol_type = other RNA
ctgtgggcccagatgccttgcacgttgcggactttgcaccc

SEQ ID NO: 12173 - RNA, 31 nt, synthetic construct
  source 1..31: mol_type = other RNA
ccaggatgccttgcacgttgcggactttgca

SEQ ID NO: 12174 - RNA, 41 nt, synthetic construct
  source 1..41: mol_type = other RNA
ctgtgggccaggatgccttccacgttgcgaactttgcaccc

SEQ ID NO: 12175 - RNA, 41 nt, synthetic construct
  source 1..41: mol_type = other RNA
atgccttccacgttgaggactttgcacgcaattccacagcc

SEQ ID NO: 12176 - RNA, 41 nt, synthetic construct
  source 1..41: mol_type = other RNA
atgccttccatgccgcggactttgcacccaattccacagcc

SEQ ID NO: 12177 - RNA, 41 nt, synthetic construct
  source 1..41: mol_type = other RNA
ctgtgggctacgatgccttccacgttggggactttgcaccc

SEQ ID NO: 12178 - RNA, 41 nt, synthetic construct
  source 1..41: mol_type = other RNA
atgccttccacgttgcggactttgcacctcatcccacagcc

SEQ ID NO: 12179 - RNA, 41 nt, synthetic construct
  source 1..41: mol_type = other RNA
atgccttccatgttgcggactttgcacggtgttccacagcc

SEQ ID NO: 12180 - RNA, 41 nt, synthetic construct
  source 1..41: mol_type = other RNA
gccaggatgccttctacgttgcggactttgcacccaattcc

SEQ ID NO: 12181 - RNA, 41 nt, synthetic construct
  source 1..41: mol_type = other RNA
ctgtgggccagactcccttccaggttgcggactttgcaccc

SEQ ID NO: 12182 - RNA, 41 nt, synthetic construct
  source 1..41: mol_type = other RNA
atgccttccacgttgcggactttgcgcccagatccacagcc

SEQ ID NO: 12183 - RNA, 41 nt, synthetic construct
  source 1..41: mol_type = other RNA
ctgtgggccaccacgccttccacgttgcggactttgcaccc

SEQ ID NO: 12184 - RNA, 41 nt, synthetic construct
  source 1..41: mol_type = other RNA
gccaggatgcctttcacgttgcggactttgcacccaattcc

SEQ ID NO: 12185 - RNA, 41 nt, synthetic construct
  source 1..41: mol_type = other RNA
ctgtgggccaggaggccttcccagttgcggactttgcaccc

SEQ ID NO: 12186 - RNA, 41 nt, synthetic construct
  source 1..41: mol_type = other RNA
atgccttcgacgttgcggactttgcaccccattccacagcc

SEQ ID NO: 12187 - RNA, 41 nt, synthetic construct
  source 1..41: mol_type = other RNA
ctgtgggccaggataccttaaacgtggaggactttgcaccc

SEQ ID NO: 12188 - RNA, 41 nt, synthetic construct
  source 1..41: mol_type = other RNA
ctgtgggccaggatgccttccacgttccggaccttgcaccc

SEQ ID NO: 12189 - RNA, 31 nt, synthetic construct
  source 1..31: mol_type = other RNA
ccaggatgccttccggcttgcggactttgca

SEQ ID NO: 12190 - RNA, 41 nt, synthetic construct
  source 1..41: mol_type = other RNA
ctgtgggccaggatgcttcacacgttgcggactttgcaccc

SEQ ID NO: 12191 - RNA, 41 nt, synthetic construct
  source 1..41: mol_type = other RNA
atgccttccacgttgtggacttctaacccaagtccacagcc

SEQ ID NO: 12192 - RNA, 31 nt, synthetic construct
  source 1..31: mol_type = other RNA
ccaggatgcctttcacgttgcggactttgca

SEQ ID NO: 12193 - RNA, 41 nt, synthetic construct
  source 1..41: mol_type = other RNA
atgccttccacgttgcggactttgcccccaattccacagcc

SEQ ID NO: 12194 - RNA, 41 nt, synthetic construct
  source 1..41: mol_type = other RNA
gccaggatgccttccacggtgcggactttgcatccaattcc

SEQ ID NO: 12195 - RNA, 41 nt, synthetic construct
  source 1..41: mol_type = other RNA
ctgtgggccgtgatgacttccacgttccggactttgcaccc

SEQ ID NO: 12196 - RNA, 41 nt, synthetic construct
  source 1..41: mol_type = other RNA
ctgtgggccaggctgccttaaacgttgaggactttgcaccc

SEQ ID NO: 12197 - RNA, 41 nt, synthetic construct
  source 1..41: mol_type = other RNA
atgccttccaggttgcggactttgcacaacattccacagcc

SEQ ID NO: 12198 - RNA, 41 nt, synthetic construct
  source 1..41: mol_type = other RNA
ctgtgggccacgatgccttccacgttgaggactttgcaccc

SEQ ID NO: 12199 - RNA, 31 nt, synthetic construct
  source 1..31: mol_type = other RNA
ccaggatgcttcacacgttgcggactttgca

SEQ ID NO: 12200 - RNA, 41 nt, synthetic construct
  source 1..41: mol_type = other RNA
ctgtgggccagggtgcttcacacgttgcggactttgcaccc

SEQ ID NO: 12201 - RNA, 31 nt, synthetic construct
  source 1..31: mol_type = other RNA
ccaggatgcctttcaacttgcggactttgca

SEQ ID NO: 12202 - RNA, 41 nt, synthetic construct
  source 1..41: mol_type = other RNA
atgccttcaacgtcgcggactttgcatcccattccacagcc

SEQ ID NO: 12203 - RNA, 41 nt, synthetic construct
  source 1..41: mol_type = other RNA
atgccttcccagttgcggactttgcacccaattccacagcc

SEQ ID NO: 12204 - RNA, 41 nt, synthetic construct
  source 1..41: mol_type = other RNA
atgccttccacgttgcggactttggttccaattccacagcc

SEQ ID NO: 12205 - RNA, 41 nt, synthetic construct
  source 1..41: mol_type = other RNA
atgccttcgacgtagcggactttgtacccacgtccacagcc

SEQ ID NO: 12206 - RNA, 41 nt, synthetic construct
  source 1..41: mol_type = other RNA
atgccttccacgttgcggactttgcacacacgcccacagcc

SEQ ID NO: 12207 - RNA, 41 nt, synthetic construct
  source 1..41: mol_type = other RNA
atgccttccacgttggggactttgcactcaactccacagcc

SEQ ID NO: 12208 - RNA, 41 nt, synthetic construct
  source 1..41: mol_type = other RNA
gccaggatgccttccacgttgcggactttgcaaccaattcc

SEQ ID NO: 12209 - RNA, 41 nt, synthetic construct
  source 1..41: mol_type = other RNA
gccaggatgccttccacgttgaggactttgcacccaattcc

SEQ ID NO: 12210 - RNA, 41 nt, synthetic construct
  source 1..41: mol_type = other RNA
atgccttccacgttgtggactttgcacaatattccacagcc

SEQ ID NO: 12211 - RNA, 41 nt, synthetic construct
  source 1..41: mol_type = other RNA
ctgtgggccaggatgccgggcacgttacggactttgcaccc

SEQ ID NO: 12212 - RNA, 40 nt, synthetic construct
  source 1..40: mol_type = other RNA
atgccttccaccttgcggactttgaaccattaccacagcc

SEQ ID NO: 12213 - RNA, 31 nt, synthetic construct
  source 1..31: mol_type = other RNA
ccaggctgccttccatgttgcggactttgca

SEQ ID NO: 12214 - RNA, 41 nt, synthetic construct
  source 1..41: mol_type = other RNA
gccaggatgccttccatgttgcggactttgcacccaattcc

SEQ ID NO: 12215 - RNA, 41 nt, synthetic construct
  source 1..41: mol_type = other RNA
ctgtgggccaggccgcactccacgttgcggactttgcaccc

SEQ ID NO: 12216 - RNA, 41 nt, synthetic construct
  source 1..41: mol_type = other RNA
gccaggatgccctcgacgtagcggactttgtacccaattcc

SEQ ID NO: 12217 - RNA, 41 nt, synthetic construct
  source 1..41: mol_type = other RNA
ctgtgggccagactgcattccaggttgcggactttgcaccc

SEQ ID NO: 12218 - RNA, 41 nt, synthetic construct
  source 1..41: mol_type = other RNA
atgccttccatgttgcggactttgcacacagttccacagcc

SEQ ID NO: 12219 - RNA, 41 nt, synthetic construct
  source 1..41: mol_type = other RNA
atgccttcaacgttgtggactttgcacctaattccacagcc

SEQ ID NO: 12220 - RNA, 31 nt, synthetic construct
  source 1..31: mol_type = other RNA
ccaggatgcctcccatgttgcggactttgca

SEQ ID NO: 12221 - RNA, 41 nt, synthetic construct
  source 1..41: mol_type = other RNA
ctgtgggcactgatgtcttccacgttgtggactttgcaccc

SEQ ID NO: 12222 - RNA, 31 nt, synthetic construct
  source 1..31: mol_type = other RNA
ccaggatgccttccacattgcggactttgca

SEQ ID NO: 12223 - RNA, 41 nt, synthetic construct
  source 1..41: mol_type = other RNA
atgccttccactttgcggactttgcacccaattccacagcc

SEQ ID NO: 12224 - RNA, 41 nt, synthetic construct
  source 1..41: mol_type = other RNA
gccaggatgccttccatgttgcggactttgcgaccaattcc

SEQ ID NO: 12225 - RNA, 31 nt, synthetic construct
  source 1..31: mol_type = other RNA
ccaggatgccttccacgttgtggactttgca

SEQ ID NO: 12226 - RNA, 41 nt, synthetic construct
  source 1..41: mol_type = other RNA
gccaggatgccttcacacttgcggactttgcccccaattcc

SEQ ID NO: 12227 - RNA, 41 nt, synthetic construct
  source 1..41: mol_type = other RNA
atgccttccacgttgcggactttgcaccccattccacagcc

SEQ ID NO: 12228 - RNA, 41 nt, synthetic construct
  source 1..41: mol_type = other RNA
atgccttccccgctgcggactttgcacccaattccacagcc

SEQ ID NO: 12229 - RNA, 42 nt, synthetic construct
  source 1..42: mol_type = other RNA
atgccttccacgttgcggactttgcctccactctccacagcc

SEQ ID NO: 12230 - RNA, 41 nt, synthetic construct
  source 1..41: mol_type = other RNA
gccaggatgtcttccacgttgcggactttgcacccaattcc

SEQ ID NO: 12231 - RNA, 41 nt, synthetic construct
  source 1..41: mol_type = other RNA
ctgtgggcctggaggccttaccacttgcggactttgcaccc

SEQ ID NO: 12232 - RNA, 41 nt, synthetic construct
  source 1..41: mol_type = other RNA
gccaggatgccttccacgttgcggactttgcacccaattcc

SEQ ID NO: 12233 - RNA, 40 nt, synthetic construct
  source 1..40: mol_type = other RNA
atgccttccacgttgcggactttgactcaattccacagcc

SEQ ID NO: 12234 - RNA, 41 nt, synthetic construct
  source 1..41: mol_type = other RNA
gccaggatgccttccacattgcggactttgcacccaattcc

SEQ ID NO: 12235 - RNA, 41 nt, synthetic construct
  source 1..41: mol_type = other RNA
gccaggatgccttccaagttgcggactttgcacccaattcc

SEQ ID NO: 12236 - RNA, 41 nt, synthetic construct
  source 1..41: mol_type = other RNA
atgccttccatgttgcggactttgcattcaaacccacagcc

SEQ ID NO: 12237 - RNA, 41 nt, synthetic construct
  source 1..41: mol_type = other RNA
gccaggatgccttaccacttgcggactttgcacccaattcc

SEQ ID NO: 12238 - RNA, 31 nt, synthetic construct
  source 1..31: mol_type = other RNA
ccaggatgccttccacgttgcggactttgca

SEQ ID NO: 12239 - RNA, 41 nt, synthetic construct
  source 1..41: mol_type = other RNA
atgccttccacgttgcggactttgcacccacttccacagcc

SEQ ID NO: 12240 - RNA, 41 nt, synthetic construct
  source 1..41: mol_type = other RNA
tccacgttgcggactttgcccccaattccaaagcctggcac

SEQ ID NO: 12241 - RNA, 41 nt, synthetic construct
  source 1..41: mol_type = other RNA
ctgtgggccaggatgccttccatgttgcggactttgcaccc

SEQ ID NO: 12242 - RNA, 53 nt, synthetic construct
  source 1..53: mol_type = other RNA
gccaggatgcccttcacgttgcggacttcgcatcaaaaatgaaacccaattcc

SEQ ID NO: 12243 - RNA, 42 nt, synthetic construct
  source 1..42: mol_type = other RNA
ctgtgggccaggatgcttcacaacgtcacggactttgcaccc

SEQ ID NO: 12244 - RNA, 31 nt, synthetic construct
  source 1..31: mol_type = other RNA
ccaggctgccttccgcgttgcggactttgca

SEQ ID NO: 12245 - RNA, 41 nt, synthetic construct
  source 1..41: mol_type = other RNA
atgccttccacgttgaggactttgcacccaattccacagcc

SEQ ID NO: 12246 - RNA, 41 nt, synthetic construct
  source 1..41: mol_type = other RNA
gccaggatgcctttaacgttgtggactttgcacccaattcc

SEQ ID NO: 12247 - RNA, 41 nt, synthetic construct
  source 1..41: mol_type = other RNA
atgccttccaagttgcggactttgcacacaattccacagcc

SEQ ID NO: 12248 - RNA, 42 nt, synthetic construct
  source 1..42: mol_type = other RNA
atgccttccaacgtcacggactttgcaccccattccacagcc

SEQ ID NO: 12249 - RNA, 41 nt, synthetic construct
  source 1..41: mol_type = other RNA
gccaggatgcctttcacgatgtggactttgcacccaattcc

SEQ ID NO: 12250 - RNA, 31 nt, synthetic construct
  source 1..31: mol_type = other RNA
ccaggatgccttctacgttgcggactttgca

SEQ ID NO: 12251 - RNA, 31 nt, synthetic construct
  source 1..31: mol_type = other RNA
tgccttctacgttgcggactttgcacccaat

SEQ ID NO: 12252 - RNA, 31 nt, synthetic construct
  source 1..31: mol_type = other RNA
ccaggataccttccacgttgaggactttgca

SEQ ID NO: 12253 - RNA, 41 nt, synthetic construct
  source 1..41: mol_type = other RNA
gccaggatgccttgcacgttgtggactttgcacccaattcc

SEQ ID NO: 12254 - RNA, 31 nt, synthetic construct
  source 1..31: mol_type = other RNA
ccaggaggccttcacacttgcggactttgca

SEQ ID NO: 12255 - RNA, 41 nt, synthetic construct
  source 1..41: mol_type = other RNA
atgccttcaacgttgaggactttgcaacccattccacagcc

SEQ ID NO: 12256 - RNA, 41 nt, synthetic construct
  source 1..41: mol_type = other RNA
gccaggatgccttccttgttgcggactttgtgaccaattcc

SEQ ID NO: 12257 - RNA, 41 nt, synthetic construct
  source 1..41: mol_type = other RNA
gccaggatgcctttcacggtgtggactttgcacccaattcc

SEQ ID NO: 12258 - RNA, 31 nt, synthetic construct
  source 1..31: mol_type = other RNA
ccaggatgcctgccactttgcggactttgca

SEQ ID NO: 12259 - RNA, 41 nt, synthetic construct
  source 1..41: mol_type = other RNA
gccaggatgccttccacgttcaggactttgcacccaattcc

SEQ ID NO: 12260 - RNA, 41 nt, synthetic construct
  source 1..41: mol_type = other RNA
gccaggatgccttccacgttgtggactttgtacccaattcc

SEQ ID NO: 12261 - RNA, 41 nt, synthetic construct
  source 1..41: mol_type = other RNA
atgccttccacgttgtggactttgaccaaatttccacagcc

SEQ ID NO: 12262 - RNA, 31 nt, synthetic construct
  source 1..31: mol_type = other RNA
ccaggatgcctcacacgttgcggactttgca

SEQ ID NO: 12263 - RNA, 41 nt, synthetic construct
  source 1..41: mol_type = other RNA
ctgtgggccaggatgccttccacgttgcggactttgcaccc

SEQ ID NO: 12264 - RNA, 31 nt, synthetic construct
  source 1..31: mol_type = other RNA
ccaggttgccctcgacgtagcggactttgca

SEQ ID NO: 12265 - RNA, 40 nt, synthetic construct
  source 1..40: mol_type = other RNA
gccaggatgccttccacgttgcggactttgacccaattcc

SEQ ID NO: 12266 - RNA, 41 nt, synthetic construct
  source 1..41: mol_type = other RNA
gccaggatgtcttccacgttgtggactttgcacccaattcc

SEQ ID NO: 12267 - RNA, 41 nt, synthetic construct
  source 1..41: mol_type = other RNA
gccaggatgccttccacgttggggactttgcacccaattcc

SEQ ID NO: 12268 - RNA, 41 nt, synthetic construct
  source 1..41: mol_type = other RNA
gccaggatgccttctacgttgtggactttggatccaattcc

SEQ ID NO: 12269 - RNA, 41 nt, synthetic construct
  source 1..41: mol_type = other RNA
gccaggatgccttcaacgttgcggactttgcacccaattcc

SEQ ID NO: 12270 - RNA, 41 nt, synthetic construct
  source 1..41: mol_type = other RNA
gccaggatgccttccacgttgcggactttgaacccaattcc

SEQ ID NO: 12271 - RNA, 41 nt, synthetic construct
  source 1..41: mol_type = other RNA
atgccttccacgttgcggactttgaattcaattccacagcc

SEQ ID NO: 12272 - RNA, 41 nt, synthetic construct
  source 1..41: mol_type = other RNA
atgccttccacgttccggactttgcacacaattccacagcc

SEQ ID NO: 12273 - RNA, 31 nt, synthetic construct
  source 1..31: mol_type = other RNA
ccaggatgccttgcacgttgtggactttgca

SEQ ID NO: 12274 - RNA, 41 nt, synthetic construct
  source 1..41: mol_type = other RNA
gccaggatgccttcccagttgcggactttgcacccaattcc

SEQ ID NO: 12275 - RNA, 41 nt, synthetic construct
  source 1..41: mol_type = other RNA
atgccttcaccgttgcggactttgcaaacacttccacagcc

SEQ ID NO: 12276 - RNA, 40 nt, synthetic construct
  source 1..40: mol_type = other RNA
atgccttccacggtgtggactttgcacccaagccacagcc

SEQ ID NO: 12277 - RNA, 41 nt, synthetic construct
  source 1..41: mol_type = other RNA
atgccttccacgttgcggactttgcacccaattccacagcc

SEQ ID NO: 12278 - RNA, 41 nt, synthetic construct
  source 1..41: mol_type = other RNA
atgccttccacgttgtggacttcaaacccaattccacagcc

SEQ ID NO: 12279 - RNA, 42 nt, synthetic construct
  source 1..42: mol_type = other RNA
atgccttccgcgttgaggactttgaaccgcaattccacagcc

SEQ ID NO: 12280 - RNA, 41 nt, synthetic construct
  source 1..41: mol_type = other RNA
gccaggatgccttcaacgtcgcggactttgcatccaattcc

SEQ ID NO: 12281 - RNA, 41 nt, synthetic construct
  source 1..41: mol_type = other RNA
ctgtgggccgggataccttccacgttgaggactttgcaccc

SEQ ID NO: 12282 - RNA, 41 nt, synthetic construct
  source 1..41: mol_type = other RNA
ctgtgggccaggatgccttccacgttgaggactttgcaccc

SEQ ID NO: 12283 - RNA, 41 nt, synthetic construct
  source 1..41: mol_type = other RNA
atgccttccacggtgcggactttgcattcaattccacagcc

SEQ ID NO: 12284 - RNA, 31 nt, synthetic construct
  source 1..31: mol_type = other RNA
ccaggatgccttacatgttgcggactttgca

SEQ ID NO: 12285 - RNA, 41 nt, synthetic construct
  source 1..41: mol_type = other RNA
gccaggatgccttacatgttgcggactttgcatccaattcc

SEQ ID NO: 12286 - RNA, 31 nt, synthetic construct
  source 1..31: mol_type = other RNA
ccagggtgcttcacacgttgcggactttgca

SEQ ID NO: 12287 - RNA, 41 nt, synthetic construct
  source 1..41: mol_type = other RNA
gccaggatggcttccccgctgcggactttgcacccaattcc

SEQ ID NO: 12288 - RNA, 37 nt, synthetic construct
  source 1..37: mol_type = other RNA
atgccttccacgttgcggactttgcaattccacagcc

SEQ ID NO: 12289 - RNA, 41 nt, synthetic construct
  source 1..41: mol_type = other RNA
ctgtgggccaggatgcctcaaccgttgcggactttgcaccc

SEQ ID NO: 12290 - RNA, 31 nt, synthetic construct
  source 1..31: mol_type = other RNA
ccaggatgcatttcacgtagcggactttgca

SEQ ID NO: 12291 - RNA, 41 nt, synthetic construct
  source 1..41: mol_type = other RNA
gccaggatgcctcccatgttgcggactttgcacccaattcc

SEQ ID NO: 12292 - RNA, 31 nt, synthetic construct
  source 1..31: mol_type = other RNA
ccaggatgccttcaacgttgcggactttgca

SEQ ID NO: 12293 - RNA, 31 nt, synthetic construct
  source 1..31: mol_type = other RNA
ccaggatgccttccacgttgaggactttgca

SEQ ID NO: 12294 - RNA, 41 nt, synthetic construct
  source 1..41: mol_type = other RNA
gccaggatgcattccacgccgcggactttgcacccaattcc

SEQ ID NO: 12295 - RNA, 40 nt, synthetic construct
  source 1..40: mol_type = other RNA
gccaggatgcctcacacgttgcggactttgcaccaattcc

SEQ ID NO: 12296 - RNA, 39 nt, synthetic construct
  source 1..39: mol_type = other RNA
atgccttccacgttcaggactttgcacccacccacagcc

SEQ ID NO: 12297 - RNA, 41 nt, synthetic construct
  source 1..41: mol_type = other RNA
ctgtgggccacaatgcccttccaactgcggactttgcaccc

SEQ ID NO: 12298 - RNA, 31 nt, synthetic construct
  source 1..31: mol_type = other RNA
ccaggatgcacttcaccttgcggactttgca

SEQ ID NO: 12299 - RNA, 31 nt, synthetic construct
  source 1..31: mol_type = other RNA
ccaggatgcctcccacgatgtggactttgca

SEQ ID NO: 12300 - RNA, 41 nt, synthetic construct
  source 1..41: mol_type = other RNA
gccaggatcccttccaggttgcggactttgaacccaattcc

SEQ ID NO: 12301 - RNA, 31 nt, synthetic construct
  source 1..31: mol_type = other RNA
ccaggatgccttcaacgtcgcggactttgca

SEQ ID NO: 12302 - RNA, 41 nt, synthetic construct
  source 1..41: mol_type = other RNA
gccaggatgcctaccccgttgcggactttatacccaattcc

SEQ ID NO: 12303 - RNA, 41 nt, synthetic construct
  source 1..41: mol_type = other RNA
gccaggatgccttacatgccgcggactttgcacccaattcc

SEQ ID NO: 12304 - RNA, 40 nt, synthetic construct
  source 1..40: mol_type = other RNA
atgccttccaccttgcggactttgaaccataaccacagcc

SEQ ID NO: 12305 - RNA, 41 nt, synthetic construct
  source 1..41: mol_type = other RNA
gccaggatgccttatacgttgtggactttgcacccaattcc

SEQ ID NO: 12306 - RNA, 31 nt, synthetic construct
  source 1..31: mol_type = other RNA
ccaggatgccttccacgttggggactttgca

SEQ ID NO: 12307 - RNA, 31 nt, synthetic construct
  source 1..31: mol_type = other RNA
ccaggatgcctaccccgttgcggactttgca

SEQ ID NO: 12308 - RNA, 41 nt, synthetic construct
  source 1..41: mol_type = other RNA
atgccttccacgttgaggactttgcactcaattccacagcc

SEQ ID NO: 12309 - RNA, 41 nt, synthetic construct
  source 1..41: mol_type = other RNA
ctgtgggccaggatgccttccacgtagcggacgttgcaccc

SEQ ID NO: 12310 - RNA, 41 nt, synthetic construct
  source 1..41: mol_type = other RNA
ctgtgggctaggatgcattccacgttgtggactttgcaccc

SEQ ID NO: 12311 - RNA, 31 nt, synthetic construct
  source 1..31: mol_type = other RNA
ccaggatgccttccaagttgcggactttgca

SEQ ID NO: 12312 - RNA, 31 nt, synthetic construct
  source 1..31: mol_type = other RNA
tgccttaccacctgcggactttgcatccaat

SEQ ID NO: 12313 - RNA, 41 nt, synthetic construct
  source 1..41: mol_type = other RNA
gccaggatgcctttcaacttgcggactttatacccaattcc

SEQ ID NO: 12314 - RNA, 41 nt, synthetic construct
  source 1..41: mol_type = other RNA
gccaggatggcttcccacgtgcggactttgcacccaattcc

SEQ ID NO: 12315 - RNA, 41 nt, synthetic construct
  source 1..41: mol_type = other RNA
atgccttccacgttgcggactttgcacccaatcccacagcc

SEQ ID NO: 12316 - RNA, 31 nt, synthetic construct
  source 1..31: mol_type = other RNA
ccaggatgcattccacgccgcggactttgca

SEQ ID NO: 12317 - RNA, 41 nt, synthetic construct
  source 1..41: mol_type = other RNA
gccaggatgccttacacgttgtggactttgcacccaattcc

SEQ ID NO: 12318 - RNA, 31 nt, synthetic construct
  source 1..31: mol_type = other RNA
ccaggatgccttcacgattgcggactttgca

SEQ ID NO: 12319 - RNA, 31 nt, synthetic construct
  source 1..31: mol_type = other RNA
ccaggatgcactccaccttgcggactttgca

SEQ ID NO: 12320 - RNA, 41 nt, synthetic construct
  source 1..41: mol_type = other RNA
gccaggataccctccgcgttgaggactttgaacccaattcc

SEQ ID NO: 12321 - RNA, 31 nt, synthetic construct
  source 1..31: mol_type = other RNA
ccaggatgcctttcacgatgtggactttgca

SEQ ID NO: 12322 - RNA, 31 nt, synthetic construct
  source 1..31: mol_type = other RNA
ccaggatgccttctacgttgtggactttgca

SEQ ID NO: 12323 - RNA, 31 nt, synthetic construct
  source 1..31: mol_type = other RNA
ccaggacgccttccacgttgcggactttgca

SEQ ID NO: 12324 - RNA, 31 nt, synthetic construct
  source 1..31: mol_type = other RNA
ccaggatgccttccttgttgcggactttgca

SEQ ID NO: 12325 - RNA, 41 nt, synthetic construct
  source 1..41: mol_type = other RNA
gccaggatgccttcgacgttgcggactttgcacccaattcc

SEQ ID NO: 12326 - RNA, 41 nt, synthetic construct
  source 1..41: mol_type = other RNA
atgccttccactttgcggactttagctaccattccacagcc

SEQ ID NO: 12327 - RNA, 41 nt, synthetic construct
  source 1..41: mol_type = other RNA
gccaggatgtcttcaacgttgaggactttgcacccaattcc

SEQ ID NO: 12328 - RNA, 42 nt, synthetic construct
  source 1..42: mol_type = other RNA
tgcctgagcgattgctctaacttttttttatttgcacccaat

SEQ ID NO: 12329 - RNA, 41 nt, synthetic construct
  source 1..41: mol_type = other RNA
gccaggatgcattccacgttgcggactttgcgcccaattcc

SEQ ID NO: 12330 - RNA, 41 nt, synthetic construct
  source 1..41: mol_type = other RNA
atgccttccacgttgaggacttggcacccccgtccacagcc

SEQ ID NO: 12331 - RNA, 41 nt, synthetic construct
  source 1..41: mol_type = other RNA
ctgtgggccaggatgccttgcacgttgtggactttgcaccc

SEQ ID NO: 12332 - RNA, 41 nt, synthetic construct
  source 1..41: mol_type = other RNA
atgccttccacgttgcgaactttgcatccacttccacagcc

SEQ ID NO: 12333 - RNA, 41 nt, synthetic construct
  source 1..41: mol_type = other RNA
gccaggatgcacttcaccttgcggactttgaacccaattcc

SEQ ID NO: 12334 - RNA, 31 nt, synthetic construct
  source 1..31: mol_type = other RNA
ccaggaggccttcccagttgcggactttgca

SEQ ID NO: 12335 - RNA, 30 nt, synthetic construct
  source 1..30: mol_type = other RNA
ccaggatgcctttccgttgtggactttgca

SEQ ID NO: 12336 - RNA, 41 nt, synthetic construct
  source 1..41: mol_type = other RNA
ctgtgggccaggatgcaccgactaccgcggactttgcaccc

SEQ ID NO: 12337 - RNA, 43 nt, synthetic construct
  source 1..43: mol_type = other RNA
atgccttccacgatgtggactttgcaccgaaaattccacagcc

SEQ ID NO: 12338 - RNA, 31 nt, synthetic construct
  source 1..31: mol_type = other RNA
ccaggatgcattccacgttgcggactttgca

SEQ ID NO: 12339 - RNA, 41 nt, synthetic construct
  source 1..41: mol_type = other RNA
gccaggatgcattccaggttgcggactttgcacccaattcc

SEQ ID NO: 12340 - RNA, 41 nt, synthetic construct
  source 1..41: mol_type = other RNA
atgccttcaacgttgcggactttgcacacaattccacagcc

SEQ ID NO: 12341 - RNA, 41 nt, synthetic construct
  source 1..41: mol_type = other RNA
gccaggataccttaaacgtggaggactttgcaaccaattcc

SEQ ID NO: 12342 - RNA, 31 nt, synthetic construct
  source 1..31: mol_type = other RNA
ccaggatgccttccacggtgcggactttgca

SEQ ID NO: 12343 - RNA, 41 nt, synthetic construct
  source 1..41: mol_type = other RNA
gccaggatgccttccacgctgcgggctttgcacccaattcc

SEQ ID NO: 12344 - RNA, 41 nt, synthetic construct
  source 1..41: mol_type = other RNA
gccaggatgcctcccacgatgtggactttgcacccaattcc

SEQ ID NO: 12345 - RNA, 41 nt, synthetic construct
  source 1..41: mol_type = other RNA
ctgtgggctaaactgccttccgcgttgcggactttgcaccc

SEQ ID NO: 12346 - RNA, 31 nt, synthetic construct
  source 1..31: mol_type = other RNA
ccaggccgcactccacgttgcggactttgca

SEQ ID NO: 12347 - RNA, 41 nt, synthetic construct
  source 1..41: mol_type = other RNA
gccaggatgcctcacacgttgcggactttgcacccaattcc

SEQ ID NO: 12348 - RNA, 31 nt, synthetic construct
  source 1..31: mol_type = other RNA
ccaggatgccttacacgttgtggactttgca

SEQ ID NO: 12349 - RNA, 41 nt, synthetic construct
  source 1..41: mol_type = other RNA
gccaggatgcattccacgttgtggactttgccaccaattcc

SEQ ID NO: 12350 - RNA, 31 nt, synthetic construct
  source 1..31: mol_type = other RNA
ccagggtgccttctgcgttgaggactttgca

SEQ ID NO: 12351 - RNA, 41 nt, synthetic construct
  source 1..41: mol_type = other RNA
ctgtgggcactgatctcttccacgttgtggactttgcaccc

SEQ ID NO: 12352 - RNA, 42 nt, synthetic construct
  source 1..42: mol_type = other RNA
cgttgctgactttgcctccactctccacagtagggcactgcc

SEQ ID NO: 12353 - RNA, 31 nt, synthetic construct
  source 1..31: mol_type = other RNA
ccaggaggccttaccacttgcggactttgca

SEQ ID NO: 12354 - RNA, 41 nt, synthetic construct
  source 1..41: mol_type = other RNA
gccaggatgccttaaacgttgaggactttgcaaccaattcc

SEQ ID NO: 12355 - RNA, 31 nt, synthetic construct
  source 1..31: mol_type = other RNA
ccaggatgacttccacgttccggactttgca

SEQ ID NO: 12356 - RNA, 41 nt, synthetic construct
  source 1..41: mol_type = other RNA
gccaggatgcactccacgttgcggactttgcacccaattcc

SEQ ID NO: 12357 - RNA, 41 nt, synthetic construct
  source 1..41: mol_type = other RNA
gccaggatgccttgcacgttgcggactttgcccccaattcc

SEQ ID NO: 12358 - RNA, 41 nt, synthetic construct
  source 1..41: mol_type = other RNA
ctgtgggccaaactgcctttcacggtgtggactttgcaccc

SEQ ID NO: 12359 - RNA, 41 nt, synthetic construct
  source 1..41: mol_type = other RNA
gccaggatgcactccaccttgcggactttgaacccaattcc

SEQ ID NO: 12360 - RNA, 31 nt, synthetic construct
  source 1..31: mol_type = other RNA
tgccttccacgttgcggactttgaacccaat

SEQ ID NO: 12361 - RNA, 31 nt, synthetic construct
  source 1..31: mol_type = other RNA
ccaggatgccttcgacgaagtggactttgca

SEQ ID NO: 12362 - RNA, 41 nt, synthetic construct
  source 1..41: mol_type = other RNA
atgccttccaacttgcggactttataccaacttccacagcc

SEQ ID NO: 12363 - RNA, 41 nt, synthetic construct
  source 1..41: mol_type = other RNA
gccaggatgtcttccacgttgtggacttcaaacccaattcc

SEQ ID NO: 12364 - RNA, 41 nt, synthetic construct
  source 1..41: mol_type = other RNA
tccacgttgcggactttgcatccaattccacaacctggcac

SEQ ID NO: 12365 - RNA, 41 nt, synthetic construct
  source 1..41: mol_type = other RNA
atgccttcactagtgcggactttgcacccaattccacagcc

SEQ ID NO: 12366 - RNA, 41 nt, synthetic construct
  source 1..41: mol_type = other RNA
ctgtgggccaggatgccttccacggggcgaactttgcaccc

SEQ ID NO: 12367 - RNA, 31 nt, synthetic construct
  source 1..31: mol_type = other RNA
cttccacgaagtggactttgcacccaattcc

SEQ ID NO: 12368 - RNA, 37 nt, synthetic construct
  source 1..37: mol_type = other RNA
ccaggatgttgactccttccacgttgcggactttgca

SEQ ID NO: 12369 - RNA, 31 nt, synthetic construct
  source 1..31: mol_type = other RNA
ccaggatgcctttaacgttgtggactttgca

SEQ ID NO: 12370 - RNA, 41 nt, synthetic construct
  source 1..41: mol_type = other RNA
tccacgttgcggactttgcgaaaaattccacagcctggcac

SEQ ID NO: 12371 - RNA, 41 nt, synthetic construct
  source 1..41: mol_type = other RNA
atgccttcgacgaagtggactttgcacccaattccacagcc

SEQ ID NO: 12372 - RNA, 31 nt, synthetic construct
  source 1..31: mol_type = other RNA
tgccttccatgttgcggactttgcacccaat

SEQ ID NO: 12373 - RNA, 41 nt, synthetic construct
  source 1..41: mol_type = other RNA
gccaggatgcatttcacgtagcggactttgcagccaattcc

SEQ ID NO: 12374 - RNA, 41 nt, synthetic construct
  source 1..41: mol_type = other RNA
cgttgctgactttgctcagtcttccacagccgagcactgcc

SEQ ID NO: 12375 - RNA, 32 nt, synthetic construct
  source 1..32: mol_type = other RNA
tgccttccaagttgcgggctttgctacccaat

SEQ ID NO: 12376 - RNA, 41 nt, synthetic construct
  source 1..41: mol_type = other RNA
ctgtgggccaagatgccttccacgttgtggactttgcaccc

SEQ ID NO: 12377 - RNA, 41 nt, synthetic construct
  source 1..41: mol_type = other RNA
ctgtgggccaagatgccttccacgttgcggactttgcaccc

SEQ ID NO: 12378 - RNA, 31 nt, synthetic construct
  source 1..31: mol_type = other RNA
ccaggatgtcttccacgttgtggactttgca

SEQ ID NO: 12379 - RNA, 41 nt, synthetic construct
  source 1..41: mol_type = other RNA
tccacgttgcggactttgcacaacattccacagcctggcac

SEQ ID NO: 12380 - RNA, 41 nt, synthetic construct
  source 1..41: mol_type = other RNA
ctgtgggccaggatcccttccacgtttcgaactttgcaccc

SEQ ID NO: 12381 - RNA, 41 nt, synthetic construct
  source 1..41: mol_type = other RNA
atgccttcaaagttgcggactttgcacccaaccccacagcc

SEQ ID NO: 12382 - RNA, 40 nt, synthetic construct
  source 1..40: mol_type = other RNA
atgccttccacttgcggactttgcacccaattccacagcc

SEQ ID NO: 12383 - RNA, 46 nt, synthetic construct
  source 1..46: mol_type = other RNA
gccaggatgcatttcacgttgtggacttcgcatcaaacccaattcc

SEQ ID NO: 12384 - RNA, 41 nt, synthetic construct
  source 1..41: mol_type = other RNA
tccacgttgcggactttgaaccccattccacagcctggcac

SEQ ID NO: 12385 - RNA, 31 nt, synthetic construct
  source 1..31: mol_type = other RNA
ccaggatgccttccacgttcaggactttgca

SEQ ID NO: 12386 - RNA, 31 nt, synthetic construct
  source 1..31: mol_type = other RNA
tgcctcacacgcggcggactttgcatccaat

SEQ ID NO: 12387 - RNA, 41 nt, synthetic construct
  source 1..41: mol_type = other RNA
atgccttcaacgtggaggactttgcaattaattccacagcc

SEQ ID NO: 12388 - RNA, 41 nt, synthetic construct
  source 1..41: mol_type = other RNA
gccaggatgccttccctgttgaggactttgcatccaattcc

SEQ ID NO: 12389 - RNA, 41 nt, synthetic construct
  source 1..41: mol_type = other RNA
atgccttccgcgttgcggacttagcacacccctccacagcc

SEQ ID NO: 12390 - RNA, 41 nt, synthetic construct
  source 1..41: mol_type = other RNA
tccacgttgcggactttgtgaccaattccaacgcctggcac

SEQ ID NO: 12391 - RNA, 31 nt, synthetic construct
  source 1..31: mol_type = other RNA
ccagggtgccttaagcgttacggactttgca

SEQ ID NO: 12392 - RNA, 59 nt, synthetic construct
  source 1..59: mol_type = other RNA
ctgtgggccaggggtgatccacttatgttgactccttccacgttgcggactttgcaccc

SEQ ID NO: 12393 - RNA, 48 nt, synthetic construct
  source 1..48: mol_type = other RNA
ctgtgggctctctgctaggatgccttcacgattgcggactttgcaccc

SEQ ID NO: 12394 - RNA, 31 nt, synthetic construct
  source 1..31: mol_type = other RNA
ccaggatgccttacatgccgcggactttgca

SEQ ID NO: 12395 - RNA, 41 nt, synthetic construct
  source 1..41: mol_type = other RNA
atgccttccatgtgcggaccactgcacccaatcccacagcc

SEQ ID NO: 12396 - RNA, 31 nt, synthetic construct
  source 1..31: mol_type = other RNA
ccaggatgcatttcacgttgtggactttgca

SEQ ID NO: 12397 - RNA, 41 nt, synthetic construct
  source 1..41: mol_type = other RNA
tccacgttgcggactttgcacacagttccacagcctggcac

SEQ ID NO: 12398 - RNA, 41 nt, synthetic construct
  source 1..41: mol_type = other RNA
tccacgttgcggactttgaattcaattccatggcctggcac

SEQ ID NO: 12399 - RNA, 31 nt, synthetic construct
  source 1..31: mol_type = other RNA
ccaggctgccttaaacgttgaggactttgca

SEQ ID NO: 12400 - RNA, 40 nt, synthetic construct
  source 1..40: mol_type = other RNA
gccaggatgcctttccgttgtggactctacacccaattcc

SEQ ID NO: 12401 - RNA, 31 nt, synthetic construct
  source 1..31: mol_type = other RNA
tgccttccaggttgcggactttgcacccaat

SEQ ID NO: 12402 - RNA, 31 nt, synthetic construct
  source 1..31: mol_type = other RNA
ccaggatgccttccacgttgcgaactttgca

SEQ ID NO: 12403 - RNA, 40 nt, synthetic construct
  source 1..40: mol_type = other RNA
atgccttccacctgcggactttgcattcaattccacagcc

SEQ ID NO: 12404 - RNA, 41 nt, synthetic construct
  source 1..41: mol_type = other RNA
tccacgttgcggactttgcatccaattccccggcctggcac

SEQ ID NO: 12405 - RNA, 31 nt, synthetic construct
  source 1..31: mol_type = other RNA
ccaggatggcttccccgctgcggactttgca

SEQ ID NO: 12406 - RNA, 41 nt, synthetic construct
  source 1..41: mol_type = other RNA
tccacgttgaggactttgcatcctgttccacaacctggcac

SEQ ID NO: 12407 - RNA, 49 nt, synthetic construct
  source 1..49: mol_type = other RNA
ctgtgggccgggatgccttccacgttgaggaccacatcattttgcaccc

SEQ ID NO: 12408 - RNA, 41 nt, synthetic construct
  source 1..41: mol_type = other RNA
gccaggatgacttccacgttccggactttgcacccaattcc

SEQ ID NO: 12409 - RNA, 41 nt, synthetic construct
  source 1..41: mol_type = other RNA
atgccttccacgttgtgggctttgcacccaattccacagcc

SEQ ID NO: 12410 - RNA, 31 nt, synthetic construct
  source 1..31: mol_type = other RNA
ccaggatgcattccacgttgtggactttgca

SEQ ID NO: 12411 - RNA, 42 nt, synthetic construct
  source 1..42: mol_type = other RNA
ccaggacgcctgagcgattgcgctaacttttttttatttgca

SEQ ID NO: 12412 - RNA, 42 nt, synthetic construct
  source 1..42: mol_type = other RNA
gccaggatgccttccaagttgcgggctttgctacccaattcc

SEQ ID NO: 12413 - RNA, 41 nt, synthetic construct
  source 1..41: mol_type = other RNA
ctgtgggccaggagaccctccgcgttgaggactttgcaccc

SEQ ID NO: 12414 - RNA, 62 nt, synthetic construct
  source 1..62: mol_type = other RNA
atgccttccacgttgctgacttcgcatcaaaaatgaaacccaataagaaaagatccacagcc

SEQ ID NO: 12415 - RNA, 41 nt, synthetic construct
  source 1..41: mol_type = other RNA
atgccttcaacgttgaggactttgcacccaattccacagcc

SEQ ID NO: 12416 - RNA, 41 nt, synthetic construct
  source 1..41: mol_type = other RNA
gccaggatgccttcacgattgcggactttgctcccaattcc

SEQ ID NO: 12417 - RNA, 41 nt, synthetic construct
  source 1..41: mol_type = other RNA
tccacgttgcggactttgcacacaattccacaacctggcac

SEQ ID NO: 12418 - RNA, 47 nt, synthetic construct
  source 1..47: mol_type = other RNA
ctgtgggccacggctgcggtgccttctgcgttgaggactttgcaccc

SEQ ID NO: 12419 - RNA, 40 nt, synthetic construct
  source 1..40: mol_type = other RNA
atgccttcccgttgtggactctacacccaattccacagcc

SEQ ID NO: 12420 - RNA, 43 nt, synthetic construct
  source 1..43: mol_type = other RNA
gccaggatgccttccgcgttgcggacttagcacacccaattcc

SEQ ID NO: 12421 - RNA, 41 nt, synthetic construct
  source 1..41: mol_type = other RNA
ctgtgggccaggctagcttaaaagttgcggactttgcaccc

SEQ ID NO: 12422 - RNA, 41 nt, synthetic construct
  source 1..41: mol_type = other RNA
atgccttccacgttacggacttcatccttgatcccacagcc

SEQ ID NO: 12423 - RNA, 41 nt, synthetic construct
  source 1..41: mol_type = other RNA
gccaggatgccttccacgtagcggacgttccacccaattcc

SEQ ID NO: 12424 - RNA, 41 nt, synthetic construct
  source 1..41: mol_type = other RNA
tccacgttgcggactttgccctcaattccccagcctggcac

SEQ ID NO: 12425 - RNA, 41 nt, synthetic construct
  source 1..41: mol_type = other RNA
tccacgttgcggactttgcattcaattccacagcctggcac

SEQ ID NO: 12426 - RNA, 47 nt, synthetic construct
  source 1..47: mol_type = other RNA
cgttgctgactttgcttccatgttttagctaccaggcgcgcactgcc

SEQ ID NO: 12427 - RNA, 41 nt, synthetic construct
  source 1..41: mol_type = other RNA
gccaggatgccttccacgttgcgaactttgcatccaattcc

SEQ ID NO: 12428 - RNA, 41 nt, synthetic construct
  source 1..41: mol_type = other RNA
tccacgttgcggactttgcatccaattccatagcctggcac

SEQ ID NO: 12429 - RNA, 40 nt, synthetic construct
  source 1..40: mol_type = other RNA
atgccttccacttgcggactttgccctcaattccacagcc

SEQ ID NO: 12430 - RNA, 31 nt, synthetic construct
  source 1..31: mol_type = other RNA
cttccacgttccggacccttaacccaattcc

SEQ ID NO: 12431 - RNA, 41 nt, synthetic construct
  source 1..41: mol_type = other RNA
gccaggatgcttcacacgttgcggactttgcacccaattcc

SEQ ID NO: 12432 - RNA, 41 nt, synthetic construct
  source 1..41: mol_type = other RNA
gccaggatgcctcaaccgttgcggactttgcaaccaattcc

SEQ ID NO: 12433 - RNA, 41 nt, synthetic construct
  source 1..41: mol_type = other RNA
atgccttccacgtttcgaactttgtacccaattccacagcc

SEQ ID NO: 12434 - RNA, 31 nt, synthetic construct
  source 1..31: mol_type = other RNA
ccaggaggccttaccacctgcggactttgca

SEQ ID NO: 12435 - RNA, 31 nt, synthetic construct
  source 1..31: mol_type = other RNA
ccaggttgccttccacgtagcggactttgca

SEQ ID NO: 12436 - RNA, 41 nt, synthetic construct
  source 1..41: mol_type = other RNA
gccaggatgccttccacgttgcggactgtgcacccaattcc

SEQ ID NO: 12437 - RNA, 41 nt, synthetic construct
  source 1..41: mol_type = other RNA
tccacgttgcggactttggttccaattccacagcctggcac

SEQ ID NO: 12438 - RNA, 64 nt, synthetic construct
  source 1..64: mol_type = other RNA
tccacgttgctgacttcgcatcaaaaatgaaacccaataagaaaagatcctacaagcctggcac

SEQ ID NO: 12439 - RNA, 31 nt, synthetic construct
  source 1..31: mol_type = other RNA
ccaggatgtcttcaacgttgaggactttgca

SEQ ID NO: 12440 - RNA, 31 nt, synthetic construct
  source 1..31: mol_type = other RNA
ccaggatgccttatacgttgtggactttgca

SEQ ID NO: 12441 - RNA, 41 nt, synthetic construct
  source 1..41: mol_type = other RNA
tccacgttgcggactttgcacccaattccgcagcctggcac

SEQ ID NO: 12442 - RNA, 41 nt, synthetic construct
  source 1..41: mol_type = other RNA
ctgtgggcgcggatgccttccacgctgcgggctttgcaccc

SEQ ID NO: 12443 - RNA, 31 nt, synthetic construct
  source 1..31: mol_type = other RNA
ccaggctcccttccaggttgcggactttgca

SEQ ID NO: 12444 - RNA, 31 nt, synthetic construct
  source 1..31: mol_type = other RNA
ccaggatgcctcaaccgttgcggactttgca

SEQ ID NO: 12445 - RNA, 41 nt, synthetic construct
  source 1..41: mol_type = other RNA
cgttgctgactttgcacacagttccacagccgggcactgcc

SEQ ID NO: 12446 - RNA, 41 nt, synthetic construct
  source 1..41: mol_type = other RNA
gccaggatgccttaccacctgcggactttgcatccaattcc

SEQ ID NO: 12447 - RNA, 41 nt, synthetic construct
  source 1..41: mol_type = other RNA
gccaggatgcctcgactagtgcggactttgcacccaattcc

SEQ ID NO: 12448 - RNA, 31 nt, synthetic construct
  source 1..31: mol_type = other RNA
tgccttccacgttggggactttgcacccaat

SEQ ID NO: 12449 - RNA, 31 nt, synthetic construct
  source 1..31: mol_type = other RNA
ccaggctgccttccacgttgtggactttgca

SEQ ID NO: 12450 - RNA, 31 nt, synthetic construct
  source 1..31: mol_type = other RNA
tgccttccacgttgcggactttgaatccaat

SEQ ID NO: 12451 - RNA, 41 nt, synthetic construct
  source 1..41: mol_type = other RNA
tccacgttggggactttgcactcaactccacagcctggcac

SEQ ID NO: 12452 - RNA, 47 nt, synthetic construct
  source 1..47: mol_type = other RNA
gccaggatgttgactccttccacgttgcggactttgcctccaattcc

SEQ ID NO: 12453 - RNA, 31 nt, synthetic construct
  source 1..31: mol_type = other RNA
ccaggatgccttccctgttgaggactttgca

SEQ ID NO: 12454 - RNA, 31 nt, synthetic construct
  source 1..31: mol_type = other RNA
ccaggatctcttccacgttgtggactttgca

SEQ ID NO: 12455 - RNA, 41 nt, synthetic construct
  source 1..41: mol_type = other RNA
tccacgttgcggactttgcacacaattccaacgcctggcac

SEQ ID NO: 12456 - RNA, 41 nt, synthetic construct
  source 1..41: mol_type = other RNA
atgccttccacgtagcggacgttccacacaattccacagcc

SEQ ID NO: 12457 - RNA, 41 nt, synthetic construct
  source 1..41: mol_type = other RNA
tccacgttgtggactttgccaacaattccaccgcctggcac

SEQ ID NO: 12458 - RNA, 31 nt, synthetic construct
  source 1..31: mol_type = other RNA
ccacgttgaggacttggcacccatttccaca

SEQ ID NO: 12459 - RNA, 41 nt, synthetic construct
  source 1..41: mol_type = other RNA
tccacgttgcggactttgcaccctgttccacaacctggcac

SEQ ID NO: 12460 - RNA, 31 nt, synthetic construct
  source 1..31: mol_type = other RNA
tgcctttcacgttgcggactttgcacccaat

SEQ ID NO: 12461 - RNA, 41 nt, synthetic construct
  source 1..41: mol_type = other RNA
gccaggataccttccacgttgaggacttggcacccaattcc

SEQ ID NO: 12462 - RNA, 42 nt, synthetic construct
  source 1..42: mol_type = other RNA
ctgtgggccaggataacttccacggtgcggacctttgcaccc

SEQ ID NO: 12463 - RNA, 31 nt, synthetic construct
  source 1..31: mol_type = other RNA
tgccttccacattgcggactttgcacccaat

SEQ ID NO: 12464 - RNA, 41 nt, synthetic construct
  source 1..41: mol_type = other RNA
tccacgttgcggactttgcgcccagatccacaacctggcac

SEQ ID NO: 12465 - RNA, 42 nt, synthetic construct
  source 1..42: mol_type = other RNA
gccaggatgcttcacaacgtcacggactttgcacccaattcc

SEQ ID NO: 12466 - RNA, 41 nt, synthetic construct
  source 1..41: mol_type = other RNA
tccacgttgcggactttatacccaattccaaagcctggcac

SEQ ID NO: 12467 - RNA, 41 nt, synthetic construct
  source 1..41: mol_type = other RNA
tccacgttgcggactttgcacacaattccatagcctggcac

SEQ ID NO: 12468 - RNA, 41 nt, synthetic construct
  source 1..41: mol_type = other RNA
tccacgttgcggactttgctcagtcttccacagcctggcac

SEQ ID NO: 12469 - RNA, 52 nt, synthetic construct
  source 1..52: mol_type = other RNA
ctgtgggccaggatgccttccacgttggagattacatggtcactttgcaccc

SEQ ID NO: 12470 - RNA, 42 nt, synthetic construct
  source 1..42: mol_type = other RNA
tccacgttgaggactttgaaccgcaattccacagcctggcac

SEQ ID NO: 12471 - RNA, 41 nt, synthetic construct
  source 1..41: mol_type = other RNA
tccacgttgtggactctacacccaattccacagcctggcac

SEQ ID NO: 12472 - RNA, 31 nt, synthetic construct
  source 1..31: mol_type = other RNA
tgccttccatgttgcggactttgcatccaat

SEQ ID NO: 12473 - RNA, 31 nt, synthetic construct
  source 1..31: mol_type = other RNA
tgccttccacgttccggactttgcacccaat

SEQ ID NO: 12474 - RNA, 41 nt, synthetic construct
  source 1..41: mol_type = other RNA
gccaggatgccttccacggggcgaactttgcttccaattcc

SEQ ID NO: 12475 - RNA, 31 nt, synthetic construct
  source 1..31: mol_type = other RNA
tgccttccacgccgcggactttgcacccaat

SEQ ID NO: 12476 - RNA, 41 nt, synthetic construct
  source 1..41: mol_type = other RNA
tccacgttgtggactttgcacccagttctacagcctggcac

SEQ ID NO: 12477 - RNA, 31 nt, synthetic construct
  source 1..31: mol_type = other RNA
cttccacgttgcggactttgcacccaattcc

SEQ ID NO: 12478 - RNA, 46 nt, synthetic construct
  source 1..46: mol_type = other RNA
tccacgttgatgactttgcacgcaattccacccaccagcctggcac

SEQ ID NO: 12479 - RNA, 41 nt, synthetic construct
  source 1..41: mol_type = other RNA
tccacgttacggactttgcaccccattccccagcctggcac

SEQ ID NO: 12480 - RNA, 41 nt, synthetic construct
  source 1..41: mol_type = other RNA
atgccttccacgctgcgggctttgcacccaattccacagcc

SEQ ID NO: 12481 - RNA, 31 nt, synthetic construct
  source 1..31: mol_type = other RNA
ccaggatgcaccgactaccgcggactttgca

SEQ ID NO: 12482 - RNA, 30 nt, synthetic construct
  source 1..30: mol_type = other RNA
cttcccgttgtggactctacacccaattcc

SEQ ID NO: 12483 - RNA, 31 nt, synthetic construct
  source 1..31: mol_type = other RNA
ccaggctgcattccaggttgcggactttgca

SEQ ID NO: 12484 - RNA, 41 nt, synthetic construct
  source 1..41: mol_type = other RNA
tccacgttgcggactttgcaaacacttccacagcctggcac

SEQ ID NO: 12485 - RNA, 41 nt, synthetic construct
  source 1..41: mol_type = other RNA
cgttgctgactttgcaaacacttccacagccgggcactgcc

SEQ ID NO: 12486 - RNA, 31 nt, synthetic construct
  source 1..31: mol_type = other RNA
cttccacggtgtggactttgcacccaattcc

SEQ ID NO: 12487 - RNA, 41 nt, synthetic construct
  source 1..41: mol_type = other RNA
cgttgctgactttgcacacaattggacagccgggcactgcc

SEQ ID NO: 12488 - RNA, 30 nt, synthetic construct
  source 1..30: mol_type = other RNA
tgccttccacgttgtggactttgacccaat

SEQ ID NO: 12489 - RNA, 31 nt, synthetic construct
  source 1..31: mol_type = other RNA
tgccttctgcgttgaggacttggcacccaat

SEQ ID NO: 12490 - RNA, 41 nt, synthetic construct
  source 1..41: mol_type = other RNA
tccacgttgcggactttgaacccaattccacagcctggcac

SEQ ID NO: 12491 - RNA, 31 nt, synthetic construct
  source 1..31: mol_type = other RNA
tgccttccacgttgcggactttgcgcccaat

SEQ ID NO: 12492 - RNA, 41 nt, synthetic construct
  source 1..41: mol_type = other RNA
gccaggatgcttcacacgttgcggacttcgcacccaattcc

SEQ ID NO: 12493 - RNA, 31 nt, synthetic construct
  source 1..31: mol_type = other RNA
tgccttccccgctgcggactttgcacccaat

SEQ ID NO: 12494 - RNA, 43 nt, synthetic construct
  source 1..43: mol_type = other RNA
cttccacgttgctgacttcgcatcaaaaatgaaacccaattcc

SEQ ID NO: 12495 - RNA, 41 nt, synthetic construct
  source 1..41: mol_type = other RNA
cgttgctgactttgcatcctgttccacaaccgggcactgcc

SEQ ID NO: 12496 - RNA, 41 nt, synthetic construct
  source 1..41: mol_type = other RNA
tccacgttgcggactttgcatcccattccagggcctggcac

SEQ ID NO: 12497 - RNA, 31 nt, synthetic construct
  source 1..31: mol_type = other RNA
tgccttcaacgtcgcggactttgcatccaat

SEQ ID NO: 12498 - RNA, 31 nt, synthetic construct
  source 1..31: mol_type = other RNA
ccaggatcccttccacgtttcgaactttgca

SEQ ID NO: 12499 - RNA, 41 nt, synthetic construct
  source 1..41: mol_type = other RNA
cgttgctgactttgcacacaattccatagccgggcactgcc

SEQ ID NO: 12500 - RNA, 41 nt, synthetic construct
  source 1..41: mol_type = other RNA
cgttgctgactttgcacaatattccacagtcgggcactgcc

SEQ ID NO: 12501 - RNA, 31 nt, synthetic construct
  source 1..31: mol_type = other RNA
tgccttccacgttgtggactttgcacccaat

SEQ ID NO: 12502 - RNA, 31 nt, synthetic construct
  source 1..31: mol_type = other RNA
ccaggagaccctccgcgttgaggactttgca

SEQ ID NO: 12503 - RNA, 31 nt, synthetic construct
  source 1..31: mol_type = other RNA
tgccttcgacgaagtggactttgcacccaat

SEQ ID NO: 12504 - RNA, 41 nt, synthetic construct
  source 1..41: mol_type = other RNA
cgttgctgactttgcacaatattccacagacgggcactgcc

SEQ ID NO: 12505 - RNA, 41 nt, synthetic construct
  source 1..41: mol_type = other RNA
tccacgttgaggactttgcactcaattccatagcctggcac

SEQ ID NO: 12506 - RNA, 41 nt, synthetic construct
  source 1..41: mol_type = other RNA
tccacgttgcggactttgcaaaccattccaaaccctggcac

SEQ ID NO: 12507 - RNA, 41 nt, synthetic construct
  source 1..41: mol_type = other RNA
tccacgttgcggactttgcacccaattacacagcctggcac

SEQ ID NO: 12508 - RNA, 41 nt, synthetic construct
  source 1..41: mol_type = other RNA
tccacgttgtggactttgcacaatattccacagcctggcac

SEQ ID NO: 12509 - RNA, 41 nt, synthetic construct
  source 1..41: mol_type = other RNA
tccacgttgtggactttgcacaacattccacagcctggcac

SEQ ID NO: 12510 - RNA, 41 nt, synthetic construct
  source 1..41: mol_type = other RNA
ctgtgggctaggacgccttccaagttgcgggctttgcaccc

SEQ ID NO: 12511 - RNA, 30 nt, synthetic construct
  source 1..30: mol_type = other RNA
ccaggatccctacacgttgcggactttgca

SEQ ID NO: 12512 - RNA, 41 nt, synthetic construct
  source 1..41: mol_type = other RNA
atgccttccacgttgcggactgtgcacaccatcccacagcc

SEQ ID NO: 12513 - RNA, 31 nt, synthetic construct
  source 1..31: mol_type = other RNA
ccaggatggcttcccacgtgcggactttgca

SEQ ID NO: 12514 - RNA, 31 nt, synthetic construct
  source 1..31: mol_type = other RNA
ccaggatgcccttccaactgcggactttgca

SEQ ID NO: 12515 - RNA, 40 nt, synthetic construct
  source 1..40: mol_type = other RNA
atgccttccaactgcggactttgcatccaattccacagcc

SEQ ID NO: 12516 - RNA, 40 nt, synthetic construct
  source 1..40: mol_type = other RNA
tccacgttgcggactttgaaccattaccacggcctggcac

SEQ ID NO: 12517 - RNA, 31 nt, synthetic construct
  source 1..31: mol_type = other RNA
ccaggatgcaccacacgcggcggactttgca

SEQ ID NO: 12518 - RNA, 31 nt, synthetic construct
  source 1..31: mol_type = other RNA
tgccttccacgttgcggactttgcaaccaat

SEQ ID NO: 12519 - RNA, 41 nt, synthetic construct
  source 1..41: mol_type = other RNA
tccacgttgcggactttgcacaatattccacagcctggcac

SEQ ID NO: 12520 - RNA, 30 nt, synthetic construct
  source 1..30: mol_type = other RNA
tgccttccacgttgcggactttgacccaat

SEQ ID NO: 12521 - RNA, 54 nt, synthetic construct
  source 1..54: mol_type = other RNA
tccacgttgctgactttgcacccaaccacaaagcaagcccccacagcctggcac

SEQ ID NO: 12522 - RNA, 41 nt, synthetic construct
  source 1..41: mol_type = other RNA
gccaggatagcttaaaagttgcggactttgcacccaattcc

SEQ ID NO: 12523 - RNA, 42 nt, synthetic construct
  source 1..42: mol_type = other RNA
ctgtgggccaggaggccttctccattctgcggctttgcaccc

SEQ ID NO: 12524 - RNA, 41 nt, synthetic construct
  source 1..41: mol_type = other RNA
ctgtgggccagactgcgttccacgttgtgggctttgcaccc

SEQ ID NO: 12525 - RNA, 49 nt, synthetic construct
  source 1..49: mol_type = other RNA
ctgtgggctcggatggcttttgcattgcgggcaggagaactttgcaccc

SEQ ID NO: 12526 - RNA, 41 nt, synthetic construct
  source 1..41: mol_type = other RNA
atgccttcccacgtgcggactttgcacccaattccacagcc

SEQ ID NO: 12527 - RNA, 41 nt, synthetic construct
  source 1..41: mol_type = other RNA
cgttgctgactttggttccaattccacagtcgggcactgcc

SEQ ID NO: 12528 - RNA, 41 nt, synthetic construct
  source 1..41: mol_type = other RNA
tccacgttgcggactttgcaccccattccacagcctggcac

SEQ ID NO: 12529 - RNA, 41 nt, synthetic construct
  source 1..41: mol_type = other RNA
tccacgttgtggactttgcacctaattccacggcctggcac

SEQ ID NO: 12530 - RNA, 41 nt, synthetic construct
  source 1..41: mol_type = other RNA
cgttgctgactttatacccaattccaaagttgcgcactgcc

SEQ ID NO: 12531 - RNA, 41 nt, synthetic construct
  source 1..41: mol_type = other RNA
tccacgttccggactttgcacacaattggacagcctggcac

SEQ ID NO: 12532 - RNA, 41 nt, synthetic construct
  source 1..41: mol_type = other RNA
tccacgttgcggactttgcattcaattccccggcctggcac

SEQ ID NO: 12533 - RNA, 31 nt, synthetic construct
  source 1..31: mol_type = other RNA
ccacgttgcggactttgcaaaccattccaca

SEQ ID NO: 12534 - RNA, 41 nt, synthetic construct
  source 1..41: mol_type = other RNA
gccaggatgcgttccacgttgtgggctttgcacccaattcc

SEQ ID NO: 12535 - RNA, 31 nt, synthetic construct
  source 1..31: mol_type = other RNA
tgctgacttcaaacccaagtccacagcctgg

SEQ ID NO: 12536 - RNA, 41 nt, synthetic construct
  source 1..41: mol_type = other RNA
gccaggatgccttccatgtgcggaccactgcacccaattcc

SEQ ID NO: 12537 - RNA, 31 nt, synthetic construct
  source 1..31: mol_type = other RNA
tgccttcgacgttgcggactttgcacccaat

SEQ ID NO: 12538 - RNA, 41 nt, synthetic construct
  source 1..41: mol_type = other RNA
tccacgttgcggactttgcaccccattccccagcctggcac

SEQ ID NO: 12539 - RNA, 41 nt, synthetic construct
  source 1..41: mol_type = other RNA
tccacgttgcggactttagctaccattccccagcctggcac

SEQ ID NO: 12540 - RNA, 31 nt, synthetic construct
  source 1..31: mol_type = other RNA
tgccttccacgttgcggactttgcctccaat

SEQ ID NO: 12541 - RNA, 31 nt, synthetic construct
  source 1..31: mol_type = other RNA
ccacgatgtggactttgcactcaattccaca

SEQ ID NO: 12542 - RNA, 41 nt, synthetic construct
  source 1..41: mol_type = other RNA
tccacgttgcggactttgcacggtgttccgcggcctggcac

SEQ ID NO: 12543 - RNA, 42 nt, synthetic construct
  source 1..42: mol_type = other RNA
gccaggatgccttctccattctgcggctttgcacccaattcc

SEQ ID NO: 12544 - RNA, 52 nt, synthetic construct
  source 1..52: mol_type = other RNA
ctgtgggccaggacgcctgagcgattgcgctaacttttttttatttgcaccc

SEQ ID NO: 12545 - RNA, 41 nt, synthetic construct
  source 1..41: mol_type = other RNA
cgttgctgactttgcaccctgttccacaacggggcactgcc

SEQ ID NO: 12546 - RNA, 31 nt, synthetic construct
  source 1..31: mol_type = other RNA
ccacgttgcggactttgcgaaaaattccaca

SEQ ID NO: 12547 - RNA, 36 nt, synthetic construct
  source 1..36: mol_type = other RNA
tgctgactttgcacgcaattccacccaccagcctgg

SEQ ID NO: 12548 - RNA, 41 nt, synthetic construct
  source 1..41: mol_type = other RNA
tccacgttgcggactttgcacccaattccacagcctggcac

SEQ ID NO: 12549 - RNA, 29 nt, synthetic construct
  source 1..29: mol_type = other RNA
ccacgttcaggactttgcacccacccaca

SEQ ID NO: 12550 - RNA, 31 nt, synthetic construct
  source 1..31: mol_type = other RNA
tgccttctacgttgtggactttggatccaat

SEQ ID NO: 12551 - RNA, 31 nt, synthetic construct
  source 1..31: mol_type = other RNA
tgctgacgttccacacaattccacagcctgg

SEQ ID NO: 12552 - RNA, 31 nt, synthetic construct
  source 1..31: mol_type = other RNA
tgccttccacgtagcggacgttccacccaat

SEQ ID NO: 12553 - RNA, 31 nt, synthetic construct
  source 1..31: mol_type = other RNA
tgccttccacgttgaggactttgcacccaat

SEQ ID NO: 12554 - RNA, 30 nt, synthetic construct
  source 1..30: mol_type = other RNA
ccaggatgccttccatgtgcggaccttgca

SEQ ID NO: 12555 - RNA, 41 nt, synthetic construct
  source 1..41: mol_type = other RNA
cgttgctgactttgcacccaattccacagcagggcactgcc

SEQ ID NO: 12556 - RNA, 41 nt, synthetic construct
  source 1..41: mol_type = other RNA
tccacgttgcggactttgcacccaattccctggcctggcac

SEQ ID NO: 12557 - RNA, 41 nt, synthetic construct
  source 1..41: mol_type = other RNA
tccacgttgcggactttgcacctcatcccacaacctggcac

SEQ ID NO: 12558 - RNA, 41 nt, synthetic construct
  source 1..41: mol_type = other RNA
atgccttccggcttgcggactgtgccttcatttccacagcc

SEQ ID NO: 12559 - RNA, 31 nt, synthetic construct
  source 1..31: mol_type = other RNA
tgccttcgacgtagcggactttgtacccaat

SEQ ID NO: 12560 - RNA, 39 nt, synthetic construct
  source 1..39: mol_type = other RNA
cgttgctgactttgcaattgcccacagccgcgcactgcc

SEQ ID NO: 12561 - RNA, 31 nt, synthetic construct
  source 1..31: mol_type = other RNA
tgccttccaagttgcggactttgcacccaat

SEQ ID NO: 12562 - RNA, 31 nt, synthetic construct
  source 1..31: mol_type = other RNA
tgccttccacgttgtggactttgtacccaat

SEQ ID NO: 12563 - RNA, 31 nt, synthetic construct
  source 1..31: mol_type = other RNA
tgccttgcacgttgtggactttgcacccaat

SEQ ID NO: 12564 - RNA, 41 nt, synthetic construct
  source 1..41: mol_type = other RNA
tccacgttacggactttgcacccaattccacagcctggcac

SEQ ID NO: 12565 - RNA, 31 nt, synthetic construct
  source 1..31: mol_type = other RNA
ccaggatgccttccacgttccggaccttgca

SEQ ID NO: 12566 - RNA, 31 nt, synthetic construct
  source 1..31: mol_type = other RNA
tgccttcccacgtgcggactttgcacccaat

SEQ ID NO: 12567 - RNA, 31 nt, synthetic construct
  source 1..31: mol_type = other RNA
ccaggatgccttccacgctgcgggctttgca

SEQ ID NO: 12568 - RNA, 31 nt, synthetic construct
  source 1..31: mol_type = other RNA
ccacgctgcgggctttgcacccaattccaca

SEQ ID NO: 12569 - RNA, 31 nt, synthetic construct
  source 1..31: mol_type = other RNA
ccacgttgcggactttgcaaacacttccaca

SEQ ID NO: 12570 - RNA, 41 nt, synthetic construct
  source 1..41: mol_type = other RNA
tccacgttgcggactttgcacacacgcccgcagcctggcac

SEQ ID NO: 12571 - RNA, 31 nt, synthetic construct
  source 1..31: mol_type = other RNA
ccacgttgcggacttagcacacccctccaca

SEQ ID NO: 12572 - RNA, 41 nt, synthetic construct
  source 1..41: mol_type = other RNA
cgttgctgacttagcacacccctccacagtcgggcactgcc

SEQ ID NO: 12573 - RNA, 41 nt, synthetic construct
  source 1..41: mol_type = other RNA
tccacgttgaggactttgcacccaattcaatagcctggcac

SEQ ID NO: 12574 - RNA, 41 nt, synthetic construct
  source 1..41: mol_type = other RNA
tccacgttgcggactttgcacccacttccatggcctggcac

SEQ ID NO: 12575 - RNA, 31 nt, synthetic construct
  source 1..31: mol_type = other RNA
tgctgactttgcacccacttccatggcctgg

SEQ ID NO: 12576 - RNA, 41 nt, synthetic construct
  source 1..41: mol_type = other RNA
cgttgctgactttgcgaaaaattccacagccgggcactgcc

SEQ ID NO: 12577 - RNA, 41 nt, synthetic construct
  source 1..41: mol_type = other RNA
cgttgctgactttgcacccgcctccaaaacagggcactgcc

SEQ ID NO: 12578 - RNA, 42 nt, synthetic construct
  source 1..42: mol_type = other RNA
tccacgttgcggactttgcacccaattacaacagcctggcac

SEQ ID NO: 12579 - RNA, 40 nt, synthetic construct
  source 1..40: mol_type = other RNA
tccacgttgcggactttgtacccacgtacctgcctggcac

SEQ ID NO: 12580 - RNA, 31 nt, synthetic construct
  source 1..31: mol_type = other RNA
tgccttccaggttgcggactttgaacccaat

SEQ ID NO: 12581 - RNA, 31 nt, synthetic construct
  source 1..31: mol_type = other RNA
cttccccgttgcggactttgcaaacaattcc

SEQ ID NO: 12582 - RNA, 42 nt, synthetic construct
  source 1..42: mol_type = other RNA
tccacgttgcggactttgcctccactctccacagcctggcac

SEQ ID NO: 12583 - RNA, 31 nt, synthetic construct
  source 1..31: mol_type = other RNA
tgcctttcacgatgtggactttgcacccaat

SEQ ID NO: 12584 - RNA, 31 nt, synthetic construct
  source 1..31: mol_type = other RNA
cttccacgttcaggactttgcacccaattcc

SEQ ID NO: 12585 - RNA, 31 nt, synthetic construct
  source 1..31: mol_type = other RNA
tgccttccacgttcaggactttgcacccaat

SEQ ID NO: 12586 - RNA, 52 nt, synthetic construct
  source 1..52: mol_type = other RNA
tgctgaccacatcatttaccgcacagatcacatcatcacgtcaacagcctgg

SEQ ID NO: 12587 - RNA, 51 nt, synthetic construct
  source 1..51: mol_type = other RNA
gccaggatgccttccacgttgaggaccacatcatttaccgcacccaattcc

SEQ ID NO: 12588 - RNA, 31 nt, synthetic construct
  source 1..31: mol_type = other RNA
ccaggatgcctcgactagtgcggactttgca

SEQ ID NO: 12589 - RNA, 40 nt, synthetic construct
  source 1..40: mol_type = other RNA
cgttgctgactttgaaccataaccacagccgggcactgcc

SEQ ID NO: 12590 - RNA, 41 nt, synthetic construct
  source 1..41: mol_type = other RNA
atgccttccacggtgcggacctttgacgcagttccacagcc

SEQ ID NO: 12591 - RNA, 31 nt, synthetic construct
  source 1..31: mol_type = other RNA
ccacgttgtggactttgccaacaattccaca

SEQ ID NO: 12592 - RNA, 31 nt, synthetic construct
  source 1..31: mol_type = other RNA
tgccttcacacttgcggactttgcccccaat

SEQ ID NO: 12593 - RNA, 40 nt, synthetic construct
  source 1..40: mol_type = other RNA
tccacgttgcggactttgcacccaatccacagcctggcac

SEQ ID NO: 12594 - RNA, 41 nt, synthetic construct
  source 1..41: mol_type = other RNA
cgttgctgactttgcattcaattccacagccgggcactgcc

SEQ ID NO: 12595 - RNA, 31 nt, synthetic construct
  source 1..31: mol_type = other RNA
tgccttccacggtgcggactttgcatccaat

SEQ ID NO: 12596 - RNA, 41 nt, synthetic construct
  source 1..41: mol_type = other RNA
gccaggatctcttccacgttgtggacttcaaacccaattcc

SEQ ID NO: 12597 - RNA, 41 nt, synthetic construct
  source 1..41: mol_type = other RNA
gccaggatgccttccacgttccggaccctaaacccaattcc

SEQ ID NO: 12598 - RNA, 31 nt, synthetic construct
  source 1..31: mol_type = other RNA
cttccacgttgcggactttgcaccccattcc

SEQ ID NO: 12599 - RNA, 42 nt, synthetic construct
  source 1..42: mol_type = other RNA
cgttgctgactttgaaccgcaattccacagccgggcactgcc

SEQ ID NO: 12600 - RNA, 41 nt, synthetic construct
  source 1..41: mol_type = other RNA
cgttgctgactttgcactcaactccacagccgggcactgcc

SEQ ID NO: 12601 - RNA, 31 nt, synthetic construct
  source 1..31: mol_type = other RNA
ccacgttgcggactttagctaccattccaca

SEQ ID NO: 12602 - RNA, 41 nt, synthetic construct
  source 1..41: mol_type = other RNA
cgttgctgactctacacccaattccacagccgggcactgcc

SEQ ID NO: 12603 - RNA, 31 nt, synthetic construct
  source 1..31: mol_type = other RNA
tgccttccacgctgcgggctttgcacccaat

SEQ ID NO: 12604 - RNA, 31 nt, synthetic construct
  source 1..31: mol_type = other RNA
ccaggctgcctttcacggtgtggactttgca

SEQ ID NO: 12605 - RNA, 31 nt, synthetic construct
  source 1..31: mol_type = other RNA
ccacgttacggacttcatccttgatcccaca

SEQ ID NO: 12606 - RNA, 33 nt, synthetic construct
  source 1..33: mol_type = other RNA
tgccttccgcgttgcggacttagcacacccaat

SEQ ID NO: 12607 - RNA, 45 nt, synthetic construct
  source 1..45: mol_type = other RNA
ccaggatggggtcgaaaatagattgttttacttgcggaccttgca

SEQ ID NO: 12608 - RNA, 57 nt, synthetic construct
  source 1..57: mol_type = other RNA
gccaggatggggtcgaaaatagattgttttacttgcggaccaattgcatccaattcc

SEQ ID NO: 12609 - RNA, 31 nt, synthetic construct
  source 1..31: mol_type = other RNA
tgcctttcaacttgcggactttatacccaat

SEQ ID NO: 12610 - RNA, 41 nt, synthetic construct
  source 1..41: mol_type = other RNA
gccaggatgcccttccaactgcggactttgcatccaattcc

SEQ ID NO: 12611 - RNA, 31 nt, synthetic construct
  source 1..31: mol_type = other RNA
ccacgccgcggactttgcacccaattccaca

SEQ ID NO: 12612 - RNA, 32 nt, synthetic construct
  source 1..32: mol_type = other RNA
ccaggaggccttctccattctgcggctttgca

SEQ ID NO: 12613 - RNA, 43 nt, synthetic construct
  source 1..43: mol_type = other RNA
atgccttccaagttgcgggctttgctacgagaattccacagcc

SEQ ID NO: 12614 - RNA, 30 nt, synthetic construct
  source 1..30: mol_type = other RNA
ccaggatccctccacgttgcggactttgca

SEQ ID NO: 12615 - RNA, 31 nt, synthetic construct
  source 1..31: mol_type = other RNA
tgccttccacgttgcggactgtgcacccaat

SEQ ID NO: 12616 - RNA, 30 nt, synthetic construct
  source 1..30: mol_type = other RNA
cttccacgttgcggactttgactcaattcc

SEQ ID NO: 12617 - RNA, 44 nt, synthetic construct
  source 1..44: mol_type = other RNA
tccacgttgctgactttgcattcaaacactgccaagcctggcac

SEQ ID NO: 12618 - RNA, 36 nt, synthetic construct
  source 1..36: mol_type = other RNA
tgcctttcacgttgtggacttcgcatcaaacccaat

SEQ ID NO: 12619 - RNA, 41 nt, synthetic construct
  source 1..41: mol_type = other RNA
cgttgctgactttgcatccaattccatagtcgggcactgcc

SEQ ID NO: 12620 - RNA, 31 nt, synthetic construct
  source 1..31: mol_type = other RNA
tgccttcaacgttgcggactttgcacccaat

SEQ ID NO: 12621 - RNA, 42 nt, synthetic construct
  source 1..42: mol_type = other RNA
atgccttccacggggcgaactttgcttccatgttccacagcc

SEQ ID NO: 12622 - RNA, 31 nt, synthetic construct
  source 1..31: mol_type = other RNA
ccaggctgcgttccacgttgtgggctttgca

SEQ ID NO: 12623 - RNA, 41 nt, synthetic construct
  source 1..41: mol_type = other RNA
tccacgttgcggactttgcacccaattccccggcctggcac

SEQ ID NO: 12624 - RNA, 41 nt, synthetic construct
  source 1..41: mol_type = other RNA
cgttgctgacttggcacccatttccaacgccgggcactgcc

SEQ ID NO: 12625 - RNA, 41 nt, synthetic construct
  source 1..41: mol_type = other RNA
cgttgctgactttgaacccaattccacagtcgggcactgcc

SEQ ID NO: 12626 - RNA, 31 nt, synthetic construct
  source 1..31: mol_type = other RNA
tgccttccacgttgcggactttggttccaat

SEQ ID NO: 12627 - RNA, 31 nt, synthetic construct
  source 1..31: mol_type = other RNA
ccacgttgcggactttgcaccctgttccaca

SEQ ID NO: 12628 - RNA, 41 nt, synthetic construct
  source 1..41: mol_type = other RNA
cgttgctgactttgcaccccattccccagccgggcactgcc

SEQ ID NO: 12629 - RNA, 31 nt, synthetic construct
  source 1..31: mol_type = other RNA
tgccttccacgttgcggactttgcacccaat

SEQ ID NO: 12630 - RNA, 31 nt, synthetic construct
  source 1..31: mol_type = other RNA
tgccttgcacgttgcggactttgcccccaat

SEQ ID NO: 12631 - RNA, 41 nt, synthetic construct
  source 1..41: mol_type = other RNA
cgttgctgactttgcacccaattccacagccgggcactgcc

SEQ ID NO: 12632 - RNA, 42 nt, synthetic construct
  source 1..42: mol_type = other RNA
ccaggatgccttccacgttggagattacatggtcactttgca

SEQ ID NO: 12633 - RNA, 41 nt, synthetic construct
  source 1..41: mol_type = other RNA
cgttgctgactttgcacacacgcccgcagccgagcactgcc

SEQ ID NO: 12634 - RNA, 31 nt, synthetic construct
  source 1..31: mol_type = other RNA
ccaggatgccgggcacgttacggactttgca

SEQ ID NO: 12635 - RNA, 31 nt, synthetic construct
  source 1..31: mol_type = other RNA
tgcctttaacgttgtggactttgcacccaat

SEQ ID NO: 12636 - RNA, 40 nt, synthetic construct
  source 1..40: mol_type = other RNA
tccacgttgcggactttgaaccataaccacagcctggcac

SEQ ID NO: 12637 - RNA, 31 nt, synthetic construct
  source 1..31: mol_type = other RNA
tgccttacacgttgtggactttgcacccaat

SEQ ID NO: 12638 - RNA, 41 nt, synthetic construct
  source 1..41: mol_type = other RNA
cgttgctgactttgaattcaattccatggccgggcactgcc

SEQ ID NO: 12639 - RNA, 31 nt, synthetic construct
  source 1..31: mol_type = other RNA
ccacgttgtggacttcaaacccaattccaca

SEQ ID NO: 12640 - RNA, 41 nt, synthetic construct
  source 1..41: mol_type = other RNA
gccaggatgccttccggcttgcggactgtgcctccaattcc

SEQ ID NO: 12641 - RNA, 31 nt, synthetic construct
  source 1..31: mol_type = other RNA
tgccttacatgttgcggactttgcatccaat

SEQ ID NO: 12642 - RNA, 31 nt, synthetic construct
  source 1..31: mol_type = other RNA
ccacgttgtggactttgtacatatttccaca

SEQ ID NO: 12643 - RNA, 48 nt, synthetic construct
  source 1..48: mol_type = other RNA
tccacgttgctaactttgcttccatgttttagctaccaggcctggcac

SEQ ID NO: 12644 - RNA, 31 nt, synthetic construct
  source 1..31: mol_type = other RNA
cttccaccttgcggactttgaaccatattcc

SEQ ID NO: 12645 - RNA, 31 nt, synthetic construct
  source 1..31: mol_type = other RNA
cttccatgccgcggactttgcacccaattcc

SEQ ID NO: 12646 - RNA, 31 nt, synthetic construct
  source 1..31: mol_type = other RNA
ccaggacgcctttcacgttgcgcaccttgca

SEQ ID NO: 12647 - RNA, 41 nt, synthetic construct
  source 1..41: mol_type = other RNA
cgttgctgactttgcaaaccattccaaacacgggcactgcc

SEQ ID NO: 12648 - RNA, 43 nt, synthetic construct
  source 1..43: mol_type = other RNA
cgttgctgactttgcaacccattcaacaaagccgggcactgcc

SEQ ID NO: 12649 - RNA, 41 nt, synthetic construct
  source 1..41: mol_type = other RNA
tccacgttgtggacttcaaacccaattccacagcctggcac

SEQ ID NO: 12650 - RNA, 31 nt, synthetic construct
  source 1..31: mol_type = other RNA
tgctgacttcaaacccaattccacagcctgg

SEQ ID NO: 12651 - RNA, 31 nt, synthetic construct
  source 1..31: mol_type = other RNA
tgcctcacacgttgcggacttcgcacccaat

SEQ ID NO: 12652 - RNA, 41 nt, synthetic construct
  source 1..41: mol_type = other RNA
cgttgctgactttgcacccaattacacagctgggcactgcc

SEQ ID NO: 12653 - RNA, 39 nt, synthetic construct
  source 1..39: mol_type = other RNA
tccacgttgcggactttgcaattgcccacagcctggcac

SEQ ID NO: 12654 - RNA, 31 nt, synthetic construct
  source 1..31: mol_type = other RNA
cttccatgttgcggactttgcacggtattcc

SEQ ID NO: 12655 - RNA, 31 nt, synthetic construct
  source 1..31: mol_type = other RNA
cttccacgccgcggactttgcaccccattcc

SEQ ID NO: 12656 - RNA, 42 nt, synthetic construct
  source 1..42: mol_type = other RNA
gccaggataacttccacggtgcggacctttgacgccaattcc

SEQ ID NO: 12657 - RNA, 31 nt, synthetic construct
  source 1..31: mol_type = other RNA
tgctgactttgcacaatattccacagcctgg

SEQ ID NO: 12658 - RNA, 41 nt, synthetic construct
  source 1..41: mol_type = other RNA
cgttgctgactttgaccaaatttccacaaccgggcactgcc

SEQ ID NO: 12659 - RNA, 31 nt, synthetic construct
  source 1..31: mol_type = other RNA
cttccacgttgtggactttgcacaacattcc

SEQ ID NO: 12660 - RNA, 41 nt, synthetic construct
  source 1..41: mol_type = other RNA
cgttgctgactttgcacaacattccacagacgggcactgcc

SEQ ID NO: 12661 - RNA, 56 nt, synthetic construct
  source 1..56: mol_type = other RNA
tccacgttgctctaacttttttttatttgcaccagttcgcagtttgtgcctggcac

SEQ ID NO: 12662 - RNA, 31 nt, synthetic construct
  source 1..31: mol_type = other RNA
tgctgactgtgcacaccatcccacaacctgg

SEQ ID NO: 12663 - RNA, 31 nt, synthetic construct
  source 1..31: mol_type = other RNA
tgctgactttggttccaattccacagcctgg

SEQ ID NO: 12664 - RNA, 31 nt, synthetic construct
  source 1..31: mol_type = other RNA
cttccacgttgcggactttgcaccctattcc

SEQ ID NO: 12665 - RNA, 30 nt, synthetic construct
  source 1..30: mol_type = other RNA
tgcctttccgttgtggactctacacccaat

SEQ ID NO: 12666 - RNA, 31 nt, synthetic construct
  source 1..31: mol_type = other RNA
tgccttccacgttgcgaactttgcatccaat

SEQ ID NO: 12667 - RNA, 31 nt, synthetic construct
  source 1..31: mol_type = other RNA
tgcctttcacgtagcggactttgcagccaat

SEQ ID NO: 12668 - RNA, 31 nt, synthetic construct
  source 1..31: mol_type = other RNA
tgctgactttgcacggtgttccgcggcctgg

SEQ ID NO: 12669 - RNA, 31 nt, synthetic construct
  source 1..31: mol_type = other RNA
tgccttccacggggcgaactttgcttccaat

SEQ ID NO: 12670 - RNA, 31 nt, synthetic construct
  source 1..31: mol_type = other RNA
tgctgactttgcactccattccccagcctgg

SEQ ID NO: 12671 - RNA, 31 nt, synthetic construct
  source 1..31: mol_type = other RNA
tgccttccacgttgtggacttctaacccaat

SEQ ID NO: 12672 - RNA, 31 nt, synthetic construct
  source 1..31: mol_type = other RNA
ccacgttgcggactttgaattcaattccaca

SEQ ID NO: 12673 - RNA, 41 nt, synthetic construct
  source 1..41: mol_type = other RNA
tccacgttgcggactttgcacccaattccatagcctggcac

SEQ ID NO: 12674 - RNA, 31 nt, synthetic construct
  source 1..31: mol_type = other RNA
tgccttccacgttccggaccctaaacccaat

SEQ ID NO: 12675 - RNA, 31 nt, synthetic construct
  source 1..31: mol_type = other RNA
tgctgactttgcacaacattccacagcctgg

SEQ ID NO: 12676 - RNA, 41 nt, synthetic construct
  source 1..41: mol_type = other RNA
tccacgtttcggacttcatccttgatcccacaacctggcac

SEQ ID NO: 12677 - RNA, 31 nt, synthetic construct
  source 1..31: mol_type = other RNA
cttccctgttgaggactttgcatcctattcc

SEQ ID NO: 12678 - RNA, 43 nt, synthetic construct
  source 1..43: mol_type = other RNA
tccacgttgaggactttgcacccaattccatgacgcctggcac

SEQ ID NO: 12679 - RNA, 31 nt, synthetic construct
  source 1..31: mol_type = other RNA
ccacgtcgcggactttgcatcccattccaca

SEQ ID NO: 12680 - RNA, 41 nt, synthetic construct
  source 1..41: mol_type = other RNA
cgttgctgactttgcacacaattccaacgccgggcactgcc

SEQ ID NO: 12681 - RNA, 31 nt, synthetic construct
  source 1..31: mol_type = other RNA
tgccttccaccttgcggactttgaacccaat

SEQ ID NO: 12682 - RNA, 31 nt, synthetic construct
  source 1..31: mol_type = other RNA
cttccacgtagcggacgttccacacaattcc

SEQ ID NO: 12683 - RNA, 41 nt, synthetic construct
  source 1..41: mol_type = other RNA
cgttgctgactttgcacccagttctacagacgggcactgcc

SEQ ID NO: 12684 - RNA, 32 nt, synthetic construct
  source 1..32: mol_type = other RNA
tgccttctccattctgcggctttgcacccaat

SEQ ID NO: 12685 - RNA, 30 nt, synthetic construct
  source 1..30: mol_type = other RNA
cttccacttgcggactttgccctcaattcc

SEQ ID NO: 12686 - RNA, 31 nt, synthetic construct
  source 1..31: mol_type = other RNA
cttccttgttgcggactttgtgaccaattcc

SEQ ID NO: 12687 - RNA, 31 nt, synthetic construct
  source 1..31: mol_type = other RNA
cttccacgttgcggactttgaacccaattcc

SEQ ID NO: 12688 - RNA, 31 nt, synthetic construct
  source 1..31: mol_type = other RNA
cttccacgttgcggactttggttccaattcc

SEQ ID NO: 12689 - RNA, 31 nt, synthetic construct
  source 1..31: mol_type = other RNA
ccacgttgcggactttgcacccaatcccaca

SEQ ID NO: 12690 - RNA, 41 nt, synthetic construct
  source 1..41: mol_type = other RNA
tccacgttgtggactttgcacccgcctccaaaacctggcac

SEQ ID NO: 12691 - RNA, 41 nt, synthetic construct
  source 1..41: mol_type = other RNA
tccacgttccggacccttaacccaattccaccgcctggcac

SEQ ID NO: 12692 - RNA, 41 nt, synthetic construct
  source 1..41: mol_type = other RNA
cgttgctgactttgcgcccagatccacaaccgtgcactgcc

SEQ ID NO: 12693 - RNA, 31 nt, synthetic construct
  source 1..31: mol_type = other RNA
ccaggatgccttcgacgttgcggactttgca

SEQ ID NO: 12694 - RNA, 31 nt, synthetic construct
  source 1..31: mol_type = other RNA
tgccttccgcgttgaggactttgaacccaat

SEQ ID NO: 12695 - RNA, 27 nt, synthetic construct
  source 1..27: mol_type = other RNA
cttccacgttgcggactttgcaattcc

SEQ ID NO: 12696 - RNA, 41 nt, synthetic construct
  source 1..41: mol_type = other RNA
tccacgttgcgaactttgcatccacttccatgtcctggcac

SEQ ID NO: 12697 - RNA, 32 nt, synthetic construct
  source 1..32: mol_type = other RNA
ccacgttgcggactttgcctccactctccaca

SEQ ID NO: 12698 - RNA, 31 nt, synthetic construct
  source 1..31: mol_type = other RNA
tgcctttcacggtgtggactttgcacccaat

SEQ ID NO: 12699 - RNA, 31 nt, synthetic construct
  source 1..31: mol_type = other RNA
cttccacgttgcggactttgcacacaattcc

SEQ ID NO: 12700 - RNA, 31 nt, synthetic construct
  source 1..31: mol_type = other RNA
tgctgactttgcacacacgcccgcagcctgg

SEQ ID NO: 12701 - RNA, 31 nt, synthetic construct
  source 1..31: mol_type = other RNA
tgccttccctgttgaggactttgcatccaat

SEQ ID NO: 12702 - RNA, 31 nt, synthetic construct
  source 1..31: mol_type = other RNA
cttccatgttgcggactttgcacacaattcc

SEQ ID NO: 12703 - RNA, 41 nt, synthetic construct
  source 1..41: mol_type = other RNA
tccacgttgcggacttagcacacccctccacagcctggcac

SEQ ID NO: 12704 - RNA, 31 nt, synthetic construct
  source 1..31: mol_type = other RNA
tgccttcaacgttgaggactttgcacccaat

SEQ ID NO: 12705 - RNA, 36 nt, synthetic construct
  source 1..36: mol_type = other RNA
tccacgttcaggactttgcacccaccagcctggcac

SEQ ID NO: 12706 - RNA, 42 nt, synthetic construct
  source 1..42: mol_type = other RNA
atgccttctacttgcggaccaattgcatacaatgccacagcc

SEQ ID NO: 12707 - RNA, 31 nt, synthetic construct
  source 1..31: mol_type = other RNA
cttccacgttgtggactttgcacctaattcc

SEQ ID NO: 12708 - RNA, 31 nt, synthetic construct
  source 1..31: mol_type = other RNA
tgccttccacgttgaggacttggcacccaat

SEQ ID NO: 12709 - RNA, 31 nt, synthetic construct
  source 1..31: mol_type = other RNA
tgctgactttgtacccaattttacggcctgg

SEQ ID NO: 12710 - RNA, 31 nt, synthetic construct
  source 1..31: mol_type = other RNA
ccacgttgcggactttgcacacaattccaca

SEQ ID NO: 12711 - RNA, 31 nt, synthetic construct
  source 1..31: mol_type = other RNA
tgcctcgactagtgcggactttgcacccaat

SEQ ID NO: 12712 - RNA, 41 nt, synthetic construct
  source 1..41: mol_type = other RNA
cgttgctgactttgcacggtgttccgcggccgggcactgcc

SEQ ID NO: 12713 - RNA, 31 nt, synthetic construct
  source 1..31: mol_type = other RNA
ccacgttgcggactttgctcagtcttccaca

SEQ ID NO: 12714 - RNA, 31 nt, synthetic construct
  source 1..31: mol_type = other RNA
cttccaagttgcggactttgcacccaattcc

SEQ ID NO: 12715 - RNA, 31 nt, synthetic construct
  source 1..31: mol_type = other RNA
tgctgactttgcacccagttctacagcctgg

SEQ ID NO: 12716 - RNA, 31 nt, synthetic construct
  source 1..31: mol_type = other RNA
ccacgttgtggactttgcacaacattccaca

SEQ ID NO: 12717 - RNA, 41 nt, synthetic construct
  source 1..41: mol_type = other RNA
cgttgctgactttgccaacaattccaccgtcgggcactgcc

SEQ ID NO: 12718 - RNA, 30 nt, synthetic construct
  source 1..30: mol_type = other RNA
ccacgtgcggactttgcattcaattccaca

SEQ ID NO: 12719 - RNA, 31 nt, synthetic construct
  source 1..31: mol_type = other RNA
tgctgactttgcattcaattccccggcctgg

SEQ ID NO: 12720 - RNA, 41 nt, synthetic construct
  source 1..41: mol_type = other RNA
cgttgctgactttgcattcaattccccggtcgagcactgcc

SEQ ID NO: 12721 - RNA, 41 nt, synthetic construct
  source 1..41: mol_type = other RNA
tccacgttgtggactttgcaccgaaaattccagcctggcac

SEQ ID NO: 12722 - RNA, 33 nt, synthetic construct
  source 1..33: mol_type = other RNA
cttccacgatgtggactttgcaccgaaaattcc

SEQ ID NO: 12723 - RNA, 41 nt, synthetic construct
  source 1..41: mol_type = other RNA
cgttgctgactttgcatccaattccccggtcgggcactgcc

SEQ ID NO: 12724 - RNA, 41 nt, synthetic construct
  source 1..41: mol_type = other RNA
cgttgctgactttgcacccaattcaatagtcgggcactgcc

SEQ ID NO: 12725 - RNA, 31 nt, synthetic construct
  source 1..31: mol_type = other RNA
ccacgttgcggactttgcacctcatcccaca

SEQ ID NO: 12726 - RNA, 31 nt, synthetic construct
  source 1..31: mol_type = other RNA
cttccacgttgcggactttgcacaatattcc

SEQ ID NO: 12727 - RNA, 43 nt, synthetic construct
  source 1..43: mol_type = other RNA
tccacgttgaggactttgcaacccattcaacaaagcctggcac

SEQ ID NO: 12728 - RNA, 44 nt, synthetic construct
  source 1..44: mol_type = other RNA
tccacgttgctgactttgactcaattccacacgccgcctggcac

SEQ ID NO: 12729 - RNA, 31 nt, synthetic construct
  source 1..31: mol_type = other RNA
ccacgttgaggactttgcacgcaattccaca

SEQ ID NO: 12730 - RNA, 31 nt, synthetic construct
  source 1..31: mol_type = other RNA
ccacgttgcggactgtgccttcatttccaca

SEQ ID NO: 12731 - RNA, 50 nt, synthetic construct
  source 1..50: mol_type = other RNA
tgccttttgctttgctggcaggagaactttttgaactcagggcacccaat

SEQ ID NO: 12732 - RNA, 31 nt, synthetic construct
  source 1..31: mol_type = other RNA
tgctgactttgcaccccattccacagcctgg

SEQ ID NO: 12733 - RNA, 40 nt, synthetic construct
  source 1..40: mol_type = other RNA
cgttgctgactttgcaccccattccacagcgggcactgcc

SEQ ID NO: 12734 - RNA, 32 nt, synthetic construct
  source 1..32: mol_type = other RNA
ccacgttgaggactttgaaccgcaattccaca

SEQ ID NO: 12735 - RNA, 56 nt, synthetic construct
  source 1..56: mol_type = other RNA
tccacgttgctgacttcgcaccccattcaaaacaaacaaacaatacgccctggcac

SEQ ID NO: 12736 - RNA, 31 nt, synthetic construct
  source 1..31: mol_type = other RNA
ccacgtcacggactttgcaccccattccaca

SEQ ID NO: 12737 - RNA, 43 nt, synthetic construct
  source 1..43: mol_type = other RNA
tgcctttcacgttgctgacttcgcatcaaaaatgaaacccaat

SEQ ID NO: 12738 - RNA, 40 nt, synthetic construct
  source 1..40: mol_type = other RNA
cgttgctgactttgcagccaatcaaacggcgggcactgcc

SEQ ID NO: 12739 - RNA, 30 nt, synthetic construct
  source 1..30: mol_type = other RNA
ccacggtgtggactttgcacccaagccaca

SEQ ID NO: 12740 - RNA, 33 nt, synthetic construct
  source 1..33: mol_type = other RNA
cttccgcgttgcggacttagcacaccccattcc

SEQ ID NO: 12741 - RNA, 36 nt, synthetic construct
  source 1..36: mol_type = other RNA
cgttgctgactttgcacccaccagccgggcactgcc

SEQ ID NO: 12742 - RNA, 41 nt, synthetic construct
  source 1..41: mol_type = other RNA
tgctgaccaattgcatacaatgtttccgtttgggagcctgg

SEQ ID NO: 12743 - RNA, 52 nt, synthetic construct
  source 1..52: mol_type = other RNA
cttccacgttgatgaccacatcatttaccgcacagatcacatcatcaattcc

SEQ ID NO: 12744 - RNA, 41 nt, synthetic construct
  source 1..41: mol_type = other RNA
tgccttccacgttgaggaccacatcatttaccgcacccaat

SEQ ID NO: 12745 - RNA, 43 nt, synthetic construct
  source 1..43: mol_type = other RNA
cgttgctgactttgtacccaattttacggctgcgggcactgcc

SEQ ID NO: 12746 - RNA, 43 nt, synthetic construct
  source 1..43: mol_type = other RNA
tccacgttgcggactttataccaacttccacacagcctggcac

SEQ ID NO: 12747 - RNA, 31 nt, synthetic construct
  source 1..31: mol_type = other RNA
ccaggatgccttccacggggcgaactttgca

SEQ ID NO: 12748 - RNA, 40 nt, synthetic construct
  source 1..40: mol_type = other RNA
cgttgctgactttgaaccattaccacggccgggcactgcc

SEQ ID NO: 12749 - RNA, 31 nt, synthetic construct
  source 1..31: mol_type = other RNA
tgcctttcaccttgcggactttgaacccaat

SEQ ID NO: 12750 - RNA, 32 nt, synthetic construct
  source 1..32: mol_type = other RNA
ccaggataacttccacggtgcggacctttgca

SEQ ID NO: 12751 - RNA, 31 nt, synthetic construct
  source 1..31: mol_type = other RNA
ccacgttgtggactttgcacccagttccaca

SEQ ID NO: 12752 - RNA, 40 nt, synthetic construct
  source 1..40: mol_type = other RNA
tccacgttgcggctttgcacctaattccccaacctggcac

SEQ ID NO: 12753 - RNA, 41 nt, synthetic construct
  source 1..41: mol_type = other RNA
tccacgttgtgggctttgcacccaattccatcgcctggcac

SEQ ID NO: 12754 - RNA, 41 nt, synthetic construct
  source 1..41: mol_type = other RNA
cgttgctgactttgtgaccaattccaacgccgggcactgcc

SEQ ID NO: 12755 - RNA, 40 nt, synthetic construct
  source 1..40: mol_type = other RNA
tccacgttgcggactttgcacccggttccctgcctggcac

SEQ ID NO: 12756 - RNA, 41 nt, synthetic construct
  source 1..41: mol_type = other RNA
cgttgctgaccttgcacaaagttccccagtcgggcactgcc

SEQ ID NO: 12757 - RNA, 31 nt, synthetic construct
  source 1..31: mol_type = other RNA
cttccacgttgaggactttgcacccaattcc

SEQ ID NO: 12758 - RNA, 31 nt, synthetic construct
  source 1..31: mol_type = other RNA
ccacgttgcggactttgcacccacttccaca

SEQ ID NO: 12759 - RNA, 41 nt, synthetic construct
  source 1..41: mol_type = other RNA
tccacgttgcggactgtgcacaccatcccacaacctggcac

SEQ ID NO: 12760 - RNA, 31 nt, synthetic construct
  source 1..31: mol_type = other RNA
cttccacgttgcggactgtgcacaccattcc

SEQ ID NO: 12761 - RNA, 41 nt, synthetic construct
  source 1..41: mol_type = other RNA
cgttgctgacccggcacgcagttccacagccgggcactgcc

SEQ ID NO: 12762 - RNA, 41 nt, synthetic construct
  source 1..41: mol_type = other RNA
cgttgctgactttgcacccaattccatagccgggcactgcc

SEQ ID NO: 12763 - RNA, 31 nt, synthetic construct
  source 1..31: mol_type = other RNA
tgccttaaacgttgaggactttgcaaccaat

SEQ ID NO: 12764 - RNA, 31 nt, synthetic construct
  source 1..31: mol_type = other RNA
tgctgactttgcccccaattccaaagcctgg

SEQ ID NO: 12765 - RNA, 42 nt, synthetic construct
  source 1..42: mol_type = other RNA
cttccacgttggagattacatggtcactttgccaccaattcc

SEQ ID NO: 12766 - RNA, 31 nt, synthetic construct
  source 1..31: mol_type = other RNA
ccacgttgcggactttgcaccccattccaca

SEQ ID NO: 12767 - RNA, 31 nt, synthetic construct
  source 1..31: mol_type = other RNA
cttccacgttgcggacttcgcaccccattcc

SEQ ID NO: 12768 - RNA, 39 nt, synthetic construct
  source 1..39: mol_type = other RNA
cgttgctgactttgcaccccattccccagccgcactgcc

SEQ ID NO: 12769 - RNA, 31 nt, synthetic construct
  source 1..31: mol_type = other RNA
tgctgactttgcactcaactccacagcctgg

SEQ ID NO: 12770 - RNA, 40 nt, synthetic construct
  source 1..40: mol_type = other RNA
cgttgctgactttgtacccacgtacctgccgggcactgcc

SEQ ID NO: 12771 - RNA, 29 nt, synthetic construct
  source 1..29: mol_type = other RNA
tgctgactttgcaattgcccacagcctgg

SEQ ID NO: 12772 - RNA, 41 nt, synthetic construct
  source 1..41: mol_type = other RNA
cgttgctgactttgcacccaattccgcagacgggcactgcc

SEQ ID NO: 12773 - RNA, 31 nt, synthetic construct
  source 1..31: mol_type = other RNA
ccacgttgcggactttgcacacacgcccaca

SEQ ID NO: 12774 - RNA, 29 nt, synthetic construct
  source 1..29: mol_type = other RNA
cttccacgtttcggacttcatcctattcc

SEQ ID NO: 12775 - RNA, 31 nt, synthetic construct
  source 1..31: mol_type = other RNA
ccacgttgcggactttgcacacagttccaca

SEQ ID NO: 12776 - RNA, 31 nt, synthetic construct
  source 1..31: mol_type = other RNA
tgctgactttgcacacagttccacagcctgg

SEQ ID NO: 12777 - RNA, 31 nt, synthetic construct
  source 1..31: mol_type = other RNA
tgctgacttagcacacccctccacagcctgg

SEQ ID NO: 12778 - RNA, 31 nt, synthetic construct
  source 1..31: mol_type = other RNA
tgctgactttgcatcccattccagggcctgg

SEQ ID NO: 12779 - RNA, 31 nt, synthetic construct
  source 1..31: mol_type = other RNA
ccacgttgtggactttgcacctaattccaca

SEQ ID NO: 12780 - RNA, 31 nt, synthetic construct
  source 1..31: mol_type = other RNA
tgcctaccccgttgcggactttatacccaat

SEQ ID NO: 12781 - RNA, 31 nt, synthetic construct
  source 1..31: mol_type = other RNA
tgccttcacgattgcggactttgctcccaat

SEQ ID NO: 12782 - RNA, 31 nt, synthetic construct
  source 1..31: mol_type = other RNA
ccaggatgccttccacgtagcggacgttgca

SEQ ID NO: 12783 - RNA, 31 nt, synthetic construct
  source 1..31: mol_type = other RNA
cttccacgttgtggactttgcacaatattcc

SEQ ID NO: 12784 - RNA, 30 nt, synthetic construct
  source 1..30: mol_type = other RNA
tgctgctttgcacctaattccccaacctgg

SEQ ID NO: 12785 - RNA, 31 nt, synthetic construct
  source 1..31: mol_type = other RNA
cttccacgttgtgggctttgcacccaattcc

SEQ ID NO: 12786 - RNA, 31 nt, synthetic construct
  source 1..31: mol_type = other RNA
ccacgttgcggactttgccctcaattccaca

SEQ ID NO: 12787 - RNA, 41 nt, synthetic construct
  source 1..41: mol_type = other RNA
cgttgctgactttgccctcaattccccagtcgagcactgcc

SEQ ID NO: 12788 - RNA, 31 nt, synthetic construct
  source 1..31: mol_type = other RNA
tgccttcccagttgcggactttgcacccaat

SEQ ID NO: 12789 - RNA, 41 nt, synthetic construct
  source 1..41: mol_type = other RNA
cgttgctgactttgcacccaattccccggccgggcactgcc

SEQ ID NO: 12790 - RNA, 41 nt, synthetic construct
  source 1..41: mol_type = other RNA
ccacgttgctctaacttttttttatttgcaccagttccaca

SEQ ID NO: 12791 - RNA, 41 nt, synthetic construct
  source 1..41: mol_type = other RNA
tccacgttgtggacttcaaacccaagtccacagcctggcac

SEQ ID NO: 12792 - RNA, 31 nt, synthetic construct
  source 1..31: mol_type = other RNA
tgctgactttgcactcaattccatagcctgg

SEQ ID NO: 12793 - RNA, 31 nt, synthetic construct
  source 1..31: mol_type = other RNA
cttccacgttgcggactttgcacctcattcc

SEQ ID NO: 12794 - RNA, 31 nt, synthetic construct
  source 1..31: mol_type = other RNA
cttccacgttccggacccggcacgcaattcc

SEQ ID NO: 12795 - RNA, 31 nt, synthetic construct
  source 1..31: mol_type = other RNA
tgctgactttgcaccctgttccacaacctgg

SEQ ID NO: 12796 - RNA, 40 nt, synthetic construct
  source 1..40: mol_type = other RNA
cgttgctgactttgcacccaatccacagccgggcactgcc

SEQ ID NO: 12797 - RNA, 41 nt, synthetic construct
  source 1..41: mol_type = other RNA
cgttgctgactttgcaattaattacctagcagggcactgcc

SEQ ID NO: 12798 - RNA, 61 nt, synthetic construct
  source 1..61: mol_type = other RNA
cgttgctgactttgcacgcaattccacccaccagccgttcttttctgaatctggcactgcc

SEQ ID NO: 12799 - RNA, 31 nt, synthetic construct
  source 1..31: mol_type = other RNA
cttccacgttgcggactttgcccccaattcc

SEQ ID NO: 12800 - RNA, 44 nt, synthetic construct
  source 1..44: mol_type = other RNA
cgttgctgactttgcccccaattccaaagagaacgggcactgcc

SEQ ID NO: 12801 - RNA, 31 nt, synthetic construct
  source 1..31: mol_type = other RNA
cttccactttgcggactttgcacccaattcc

SEQ ID NO: 12802 - RNA, 32 nt, synthetic construct
  source 1..32: mol_type = other RNA
tgctgaccactgcacccaatcccaaggcctgg

SEQ ID NO: 12803 - RNA, 60 nt, synthetic construct
  source 1..60: mol_type = other RNA
gccaggatggcttttgctttgctggcaggagaactttttgaactcagggcacccaattcc

SEQ ID NO: 12804 - RNA, 31 nt, synthetic construct
  source 1..31: mol_type = other RNA
ccacgttgcggactttgcattcaaacccaca

SEQ ID NO: 12805 - RNA, 31 nt, synthetic construct
  source 1..31: mol_type = other RNA
cttccatgttgcggactttgcattcaattcc

SEQ ID NO: 12806 - RNA, 41 nt, synthetic construct
  source 1..41: mol_type = other RNA
cgttgctgactttgccaccaattccatggtcgagcactgcc

SEQ ID NO: 12807 - RNA, 46 nt, synthetic construct
  source 1..46: mol_type = other RNA
tgctgacttcgcaccccattcaaaacaaacaaacaatacgccctgg

SEQ ID NO: 12808 - RNA, 56 nt, synthetic construct
  source 1..56: mol_type = other RNA
cgttgctgacttcgcaccccattcaaaacaaacaaacaatacgcccgggcactgcc

SEQ ID NO: 12809 - RNA, 32 nt, synthetic construct
  source 1..32: mol_type = other RNA
ccaggatgcttcacaacgtcacggactttgca

SEQ ID NO: 12810 - RNA, 31 nt, synthetic construct
  source 1..31: mol_type = other RNA
ccacgctgcggactttgcacccaattccaca

SEQ ID NO: 12811 - RNA, 32 nt, synthetic construct
  source 1..32: mol_type = other RNA
tgctgactttgcacccaattacaacagcctgg

SEQ ID NO: 12812 - RNA, 31 nt, synthetic construct
  source 1..31: mol_type = other RNA
cttccacgtagcggactttgtacccaattcc

SEQ ID NO: 12813 - RNA, 30 nt, synthetic construct
  source 1..30: mol_type = other RNA
tgctgactttgtacccacgtacctgcctgg

SEQ ID NO: 12814 - RNA, 36 nt, synthetic construct
  source 1..36: mol_type = other RNA
cttccacgttgtggacttcgcatcaaacccaattcc

SEQ ID NO: 12815 - RNA, 41 nt, synthetic construct
  source 1..41: mol_type = other RNA
tccacgttgcgggctttgcacccaattccaaagcctggcac

SEQ ID NO: 12816 - RNA, 31 nt, synthetic construct
  source 1..31: mol_type = other RNA
ccacgttgcggactttgcacaacattccaca

SEQ ID NO: 12817 - RNA, 31 nt, synthetic construct
  source 1..31: mol_type = other RNA
cttccaggttgcggactttgcacaacattcc

SEQ ID NO: 12818 - RNA, 31 nt, synthetic construct
  source 1..31: mol_type = other RNA
cttccaggttgcggactttgaaccccattcc

SEQ ID NO: 12819 - RNA, 31 nt, synthetic construct
  source 1..31: mol_type = other RNA
tgctgactttgcaaacacttccacagcctgg

SEQ ID NO: 12820 - RNA, 31 nt, synthetic construct
  source 1..31: mol_type = other RNA
tgcctcaaccgttgcggactttgcaaccaat

SEQ ID NO: 12821 - RNA, 40 nt, synthetic construct
  source 1..40: mol_type = other RNA
cgttgctgactttgcatccacttccatgttgggcactgcc

SEQ ID NO: 12822 - RNA, 41 nt, synthetic construct
  source 1..41: mol_type = other RNA
tccacgttgcggactttgcagccaatcaaacggcctggcac

SEQ ID NO: 12823 - RNA, 31 nt, synthetic construct
  source 1..31: mol_type = other RNA
tgctgactttgcacccaattccgcagcctgg

SEQ ID NO: 12824 - RNA, 31 nt, synthetic construct
  source 1..31: mol_type = other RNA
cttccatgttgcggactttgcatccaattcc

SEQ ID NO: 12825 - RNA, 40 nt, synthetic construct
  source 1..40: mol_type = other RNA
cgttgctgactttgcatccaattccacaacgggcactgcc

SEQ ID NO: 12826 - RNA, 31 nt, synthetic construct
  source 1..31: mol_type = other RNA
ccacgttgaggactttgcatcctgttccaca

SEQ ID NO: 12827 - RNA, 40 nt, synthetic construct
  source 1..40: mol_type = other RNA
cgttgctgactttgcatcccattccagggagggcactgcc

SEQ ID NO: 12828 - RNA, 41 nt, synthetic construct
  source 1..41: mol_type = other RNA
cgttgctgacttggcacccccgtcagcagccgggcactgcc

SEQ ID NO: 12829 - RNA, 42 nt, synthetic construct
  source 1..42: mol_type = other RNA
cgttgctgactttataccaacttccacacagcgggcactgcc

SEQ ID NO: 12830 - RNA, 30 nt, synthetic construct
  source 1..30: mol_type = other RNA
cttccaactgcggactttgcatccaattcc

SEQ ID NO: 12831 - RNA, 30 nt, synthetic construct
  source 1..30: mol_type = other RNA
tgccttccaactgcggactttgcatccaat

SEQ ID NO: 12832 - RNA, 32 nt, synthetic construct
  source 1..32: mol_type = other RNA
ccacggggcgaactttgcttccatgttccaca

SEQ ID NO: 12833 - RNA, 31 nt, synthetic construct
  source 1..31: mol_type = other RNA
cttccacggggcgaactttgcttccaattcc

SEQ ID NO: 12834 - RNA, 31 nt, synthetic construct
  source 1..31: mol_type = other RNA
ccacgccgcggactttgcaccccattccaca

SEQ ID NO: 12835 - RNA, 41 nt, synthetic construct
  source 1..41: mol_type = other RNA
tccacgttgcggacctttgacgcagttccacagcctggcac

SEQ ID NO: 12836 - RNA, 32 nt, synthetic construct
  source 1..32: mol_type = other RNA
cttccccattctgcggctttgcacctaattcc

SEQ ID NO: 12837 - RNA, 40 nt, synthetic construct
  source 1..40: mol_type = other RNA
cgttgctgctttgcacctaattccccaaaagggcactgcc

SEQ ID NO: 12838 - RNA, 31 nt, synthetic construct
  source 1..31: mol_type = other RNA
tgctggctttgcacccaattccatcgcctgg

SEQ ID NO: 12839 - RNA, 31 nt, synthetic construct
  source 1..31: mol_type = other RNA
cttcccagttgcggactttgcacccaattcc

SEQ ID NO: 12840 - RNA, 31 nt, synthetic construct
  source 1..31: mol_type = other RNA
ccaggacgccttccaagttgcgggctttgca

SEQ ID NO: 12841 - RNA, 41 nt, synthetic construct
  source 1..41: mol_type = other RNA
cgttgctgactttgcacccggttccctgctcgggcactgcc

SEQ ID NO: 12842 - RNA, 36 nt, synthetic construct
  source 1..36: mol_type = other RNA
tgctggcttaaaattgcacccaattccaaagcctgg

SEQ ID NO: 12843 - RNA, 31 nt, synthetic construct
  source 1..31: mol_type = other RNA
ccacgttgaggactttgcactcaattccaca

SEQ ID NO: 12844 - RNA, 41 nt, synthetic construct
  source 1..41: mol_type = other RNA
cgttgctgactttgcacccacttccatggtagggcactgcc

SEQ ID NO: 12845 - RNA, 41 nt, synthetic construct
  source 1..41: mol_type = other RNA
cgttgctgactttgcacctcatcccacaaacgagcactgcc

SEQ ID NO: 12846 - RNA, 32 nt, synthetic construct
  source 1..32: mol_type = other RNA
cttccacgttgcggactttgcaaaccaattcc

SEQ ID NO: 12847 - RNA, 41 nt, synthetic construct
  source 1..41: mol_type = other RNA
atgccttccacgttccggacccggcacgcagttccacagcc

SEQ ID NO: 12848 - RNA, 31 nt, synthetic construct
  source 1..31: mol_type = other RNA
cttccacgttgcggactttgaattcaattcc

SEQ ID NO: 12849 - RNA, 31 nt, synthetic construct
  source 1..31: mol_type = other RNA
tgctgactttgcacccaattccatagcctgg

SEQ ID NO: 12850 - RNA, 31 nt, synthetic construct
  source 1..31: mol_type = other RNA
ccaggataccttaaacgtggaggactttgca

SEQ ID NO: 12851 - RNA, 31 nt, synthetic construct
  source 1..31: mol_type = other RNA
ccacgttgcggacttcgcaccccattccaca

SEQ ID NO: 12852 - RNA, 31 nt, synthetic construct
  source 1..31: mol_type = other RNA
tgctgactttgaaccccattccacagcctgg

SEQ ID NO: 12853 - RNA, 26 nt, synthetic construct
  source 1..26: mol_type = other RNA
tgctgactttgcacccaccagcctgg

SEQ ID NO: 12854 - RNA, 41 nt, synthetic construct
  source 1..41: mol_type = other RNA
tccacgttgaggacttggcacccccgtcagcagcctggcac

SEQ ID NO: 12855 - RNA, 29 nt, synthetic construct
  source 1..29: mol_type = other RNA
ccacggcggactttgcacccggttccaca

SEQ ID NO: 12856 - RNA, 31 nt, synthetic construct
  source 1..31: mol_type = other RNA
cttccgcgttgaggacttggcacccaattcc

SEQ ID NO: 12857 - RNA, 31 nt, synthetic construct
  source 1..31: mol_type = other RNA
tgctgactttgaacccaattccacagcctgg

SEQ ID NO: 12858 - RNA, 34 nt, synthetic construct
  source 1..34: mol_type = other RNA
tgctgactttgactcaattccacacgccgcctgg

SEQ ID NO: 12859 - RNA, 31 nt, synthetic construct
  source 1..31: mol_type = other RNA
ccacgttgtggactttgcacccgcctccaca

SEQ ID NO: 12860 - RNA, 31 nt, synthetic construct
  source 1..31: mol_type = other RNA
tgctgactttgcattcaattccacagcctgg

SEQ ID NO: 12861 - RNA, 31 nt, synthetic construct
  source 1..31: mol_type = other RNA
tgccttccacgttgtggacttcaaacccaat

SEQ ID NO: 12862 - RNA, 31 nt, synthetic construct
  source 1..31: mol_type = other RNA
ccacgttccggacccttaacccaattccaca

SEQ ID NO: 12863 - RNA, 31 nt, synthetic construct
  source 1..31: mol_type = other RNA
tgctgaccctaaacccaattccaccgcctgg

SEQ ID NO: 12864 - RNA, 31 nt, synthetic construct
  source 1..31: mol_type = other RNA
tgccttccatgtgcggaccactgcacccaat

SEQ ID NO: 12865 - RNA, 39 nt, synthetic construct
  source 1..39: mol_type = other RNA
ccaggatggcttttgctttgcgggcaggagaactttgca

SEQ ID NO: 12866 - RNA, 31 nt, synthetic construct
  source 1..31: mol_type = other RNA
ccacgttgcggactttgcgcccagatccaca

SEQ ID NO: 12867 - RNA, 32 nt, synthetic construct
  source 1..32: mol_type = other RNA
tgctgactttgaaccgcaattccacagcctgg

SEQ ID NO: 12868 - RNA, 31 nt, synthetic construct
  source 1..31: mol_type = other RNA
cttccactttgcggactttagctaccattcc

SEQ ID NO: 12869 - RNA, 31 nt, synthetic construct
  source 1..31: mol_type = other RNA
cttccccgctgcggactttgcacccaattcc

SEQ ID NO: 12870 - RNA, 36 nt, synthetic construct
  source 1..36: mol_type = other RNA
ccacgttgttgacttcgcatcaaacccaattccaca

SEQ ID NO: 12871 - RNA, 27 nt, synthetic construct
  source 1..27: mol_type = other RNA
ccacgttgcggactttgcaattccaca

SEQ ID NO: 12872 - RNA, 32 nt, synthetic construct
  source 1..32: mol_type = other RNA
tgctgactttgcctccactctccacagcctgg

SEQ ID NO: 12873 - RNA, 31 nt, synthetic construct
  source 1..31: mol_type = other RNA
tgctgacttcatccttgatcccacaacctgg

SEQ ID NO: 12874 - RNA, 41 nt, synthetic construct
  source 1..41: mol_type = other RNA
cgttgctgacttcatccttgatcccacaaccgggcactgcc

SEQ ID NO: 12875 - RNA, 31 nt, synthetic construct
  source 1..31: mol_type = other RNA
tgctgactttgcatccaattccacaacctgg

SEQ ID NO: 12876 - RNA, 31 nt, synthetic construct
  source 1..31: mol_type = other RNA
tgctgactttgcatcctgttccacaacctgg

SEQ ID NO: 12877 - RNA, 43 nt, synthetic construct
  source 1..43: mol_type = other RNA
cgttgctgactttgcacccaattccatgacgccgagcactgcc

SEQ ID NO: 12878 - RNA, 31 nt, synthetic construct
  source 1..31: mol_type = other RNA
cttccacgtcgcggactttgcatcccattcc

SEQ ID NO: 12879 - RNA, 40 nt, synthetic construct
  source 1..40: mol_type = other RNA
cgttgctgactttgcacctaattccacggagggcactgcc

SEQ ID NO: 12880 - RNA, 31 nt, synthetic construct
  source 1..31: mol_type = other RNA
ccacgttgaggacttggcacccccgtccaca

SEQ ID NO: 12881 - RNA, 31 nt, synthetic construct
  source 1..31: mol_type = other RNA
cttccacgttgaggacttggcaccccattcc

SEQ ID NO: 12882 - RNA, 41 nt, synthetic construct
  source 1..41: mol_type = other RNA
tccacgtttcgaactttgtacccaattttacggcctggcac

SEQ ID NO: 12883 - RNA, 41 nt, synthetic construct
  source 1..41: mol_type = other RNA
gccaggatcccttccacgtttcgaactttgtacccaattcc

SEQ ID NO: 12884 - RNA, 31 nt, synthetic construct
  source 1..31: mol_type = other RNA
cttccccgttgcggactttatacccaattcc

SEQ ID NO: 12885 - RNA, 31 nt, synthetic construct
  source 1..31: mol_type = other RNA
tgcctcccatgttgcggactttgcacccaat

SEQ ID NO: 12886 - RNA, 31 nt, synthetic construct
  source 1..31: mol_type = other RNA
tgctgactttgcacacaattccaacgcctgg

SEQ ID NO: 12887 - RNA, 32 nt, synthetic construct
  source 1..32: mol_type = other RNA
cttccacgattgcggactttgctcagtattcc

SEQ ID NO: 12888 - RNA, 31 nt, synthetic construct
  source 1..31: mol_type = other RNA
ccaggctagcttaaaagttgcggactttgca

SEQ ID NO: 12889 - RNA, 55 nt, synthetic construct
  source 1..55: mol_type = other RNA
cgttgctgactttgcacccaaccacaaagcaagcccccacagctcgggcactgcc

SEQ ID NO: 12890 - RNA, 30 nt, synthetic construct
  source 1..30: mol_type = other RNA
ccacgttgcggactttgaaccattaccaca

SEQ ID NO: 12891 - RNA, 30 nt, synthetic construct
  source 1..30: mol_type = other RNA
ccacgttgcggactttgaaccataaccaca

SEQ ID NO: 12892 - RNA, 30 nt, synthetic construct
  source 1..30: mol_type = other RNA
tgctgactttgaaccataaccacagcctgg

SEQ ID NO: 12893 - RNA, 41 nt, synthetic construct
  source 1..41: mol_type = other RNA
tccacgttgcggacgttccacacaattccacagcctggcac

SEQ ID NO: 12894 - RNA, 32 nt, synthetic construct
  source 1..32: mol_type = other RNA
tgccttccacggtgcggacctttgacgccaat

SEQ ID NO: 12895 - RNA, 41 nt, synthetic construct
  source 1..41: mol_type = other RNA
tccacgttgtggactttgaccaaatttccacaacctggcac

SEQ ID NO: 12896 - RNA, 31 nt, synthetic construct
  source 1..31: mol_type = other RNA
tgctgactttgaccaaatttccacaacctgg

SEQ ID NO: 12897 - RNA, 31 nt, synthetic construct
  source 1..31: mol_type = other RNA
tgccttatacgttgtggactttgcacccaat

SEQ ID NO: 12898 - RNA, 42 nt, synthetic construct
  source 1..42: mol_type = other RNA
atgccttctccattctgcggctttgcacctaattccacagcc

SEQ ID NO: 12899 - RNA, 31 nt, synthetic construct
  source 1..31: mol_type = other RNA
cttccacgttgtggactttgccaacaattcc

SEQ ID NO: 12900 - RNA, 31 nt, synthetic construct
  source 1..31: mol_type = other RNA
tgctgactttgccctcaattccccagcctgg

SEQ ID NO: 12901 - RNA, 41 nt, synthetic construct
  source 1..41: mol_type = other RNA
cgttgctgactttgcacccaattccctggtcgggcactgcc

SEQ ID NO: 12902 - RNA, 52 nt, synthetic construct
  source 1..52: mol_type = other RNA
gccaggatgcctgagcgattgcgctaacttttttttatttgcacccaattcc

SEQ ID NO: 12903 - RNA, 43 nt, synthetic construct
  source 1..43: mol_type = other RNA
tccacgttgcgggctttgctacgagaattccatggcctggcac

SEQ ID NO: 12904 - RNA, 41 nt, synthetic construct
  source 1..41: mol_type = other RNA
cgttgctgactttgcacacaattccacaagagggcactgcc

SEQ ID NO: 12905 - RNA, 31 nt, synthetic construct
  source 1..31: mol_type = other RNA
tgctgactttgtgaccaattccaacgcctgg

SEQ ID NO: 12906 - RNA, 31 nt, synthetic construct
  source 1..31: mol_type = other RNA
ccacgcggcggactttgcatccaattccaca

SEQ ID NO: 12907 - RNA, 31 nt, synthetic construct
  source 1..31: mol_type = other RNA
ccacgttacggactttgcacccaattccaca

SEQ ID NO: 12908 - RNA, 31 nt, synthetic construct
  source 1..31: mol_type = other RNA
tgctgaccttgcacaaagttccccagcctgg

SEQ ID NO: 12909 - RNA, 31 nt, synthetic construct
  source 1..31: mol_type = other RNA
tgctgactttgcacctcatcccacaacctgg

SEQ ID NO: 12910 - RNA, 31 nt, synthetic construct
  source 1..31: mol_type = other RNA
cttccacgttgtggactttgtacctaattcc

SEQ ID NO: 12911 - RNA, 31 nt, synthetic construct
  source 1..31: mol_type = other RNA
ccacgttgcggactttggttccaattccaca

SEQ ID NO: 12912 - RNA, 39 nt, synthetic construct
  source 1..39: mol_type = other RNA
ccaggatgccttccacgttgaggaccacatcattttgca

SEQ ID NO: 12913 - RNA, 30 nt, synthetic construct
  source 1..30: mol_type = other RNA
tgctgactttgcacccaatccacagcctgg

SEQ ID NO: 12914 - RNA, 31 nt, synthetic construct
  source 1..31: mol_type = other RNA
ccacgttgaggactttgcaacccattccaca

SEQ ID NO: 12915 - RNA, 33 nt, synthetic construct
  source 1..33: mol_type = other RNA
tgctgactttgcaacccattcaacaaagcctgg

SEQ ID NO: 12916 - RNA, 31 nt, synthetic construct
  source 1..31: mol_type = other RNA
ccacgtggaggactttgcaattaattccaca

SEQ ID NO: 12917 - RNA, 31 nt, synthetic construct
  source 1..31: mol_type = other RNA
tgctgactttgcaattaattacctagcctgg

SEQ ID NO: 12918 - RNA, 31 nt, synthetic construct
  source 1..31: mol_type = other RNA
cttccacgttgaggactttgcacgcaattcc

SEQ ID NO: 12919 - RNA, 31 nt, synthetic construct
  source 1..31: mol_type = other RNA
cttccacgttgtggactttgcacccgattcc

SEQ ID NO: 12920 - RNA, 31 nt, synthetic construct
  source 1..31: mol_type = other RNA
tgctgactttgcacccgcctccaaaacctgg

SEQ ID NO: 12921 - RNA, 31 nt, synthetic construct
  source 1..31: mol_type = other RNA
ccacgttgcggactttgcccccaattccaca

SEQ ID NO: 12922 - RNA, 31 nt, synthetic construct
  source 1..31: mol_type = other RNA
ccacgttgcggactttgcacccaattccaca

SEQ ID NO: 12923 - RNA, 31 nt, synthetic construct
  source 1..31: mol_type = other RNA
ccacggtgcggactttgcattcaattccaca

SEQ ID NO: 12924 - RNA, 31 nt, synthetic construct
  source 1..31: mol_type = other RNA
cttccacggtgcggactttgcattcaattcc

SEQ ID NO: 12925 - RNA, 41 nt, synthetic construct
  source 1..41: mol_type = other RNA
atgccttccacgttccggacccttaacccaattccacagcc

SEQ ID NO: 12926 - RNA, 41 nt, synthetic construct
  source 1..41: mol_type = other RNA
cgttgctgacccttaacccaattccaccgccgagcactgcc

SEQ ID NO: 12927 - RNA, 41 nt, synthetic construct
  source 1..41: mol_type = other RNA
tccacgttgcggactgtgccttcatttccgacacctggcac

SEQ ID NO: 12928 - RNA, 31 nt, synthetic construct
  source 1..31: mol_type = other RNA
cttccggcttgcggactgtgccttcaattcc

SEQ ID NO: 12929 - RNA, 42 nt, synthetic construct
  source 1..42: mol_type = other RNA
tccacgttgcggaccactgcacccaatcccaaggcctggcac

SEQ ID NO: 12930 - RNA, 31 nt, synthetic construct
  source 1..31: mol_type = other RNA
cttccacgttgcggactttgcgcccaattcc

SEQ ID NO: 12931 - RNA, 42 nt, synthetic construct
  source 1..42: mol_type = other RNA
ccacgttggagattacatggtcactttgccaccaattccaca

SEQ ID NO: 12932 - RNA, 52 nt, synthetic construct
  source 1..52: mol_type = other RNA
atgccttccacgttggagattacatggtcactttgccaccaattccacagcc

SEQ ID NO: 12933 - RNA, 42 nt, synthetic construct
  source 1..42: mol_type = other RNA
tgccttccacgttggagattacatggtcactttgccaccaat

SEQ ID NO: 12934 - RNA, 31 nt, synthetic construct
  source 1..31: mol_type = other RNA
tgctgactttgcaccccattccccagcctgg

SEQ ID NO: 12935 - RNA, 31 nt, synthetic construct
  source 1..31: mol_type = other RNA
tgcctcacacgttgcggactttgcacccaat

SEQ ID NO: 12936 - RNA, 32 nt, synthetic construct
  source 1..32: mol_type = other RNA
cttccaacgtcacggactttgcaccccattcc

SEQ ID NO: 12937 - RNA, 32 nt, synthetic construct
  source 1..32: mol_type = other RNA
tgcctcacaacgtcacggactttgcacccaat

SEQ ID NO: 12938 - RNA, 41 nt, synthetic construct
  source 1..41: mol_type = other RNA
cgttgctgactttagctaccattccccagatgggcactgcc

SEQ ID NO: 12939 - RNA, 31 nt, synthetic construct
  source 1..31: mol_type = other RNA
tgctgactttgcacccaattacacagcctgg

SEQ ID NO: 12940 - RNA, 42 nt, synthetic construct
  source 1..42: mol_type = other RNA
cgttgctgactttgcacccaattacaacagccgggcactgcc

SEQ ID NO: 12941 - RNA, 31 nt, synthetic construct
  source 1..31: mol_type = other RNA
ccacgtagcggactttgtacccacgtccaca

SEQ ID NO: 12942 - RNA, 64 nt, synthetic construct
  source 1..64: mol_type = other RNA
cgttgctgacttcgcatcaaaaatgaaacccaataagaaaagatcctacaagccgggcactgcc

SEQ ID NO: 12943 - RNA, 47 nt, synthetic construct
  source 1..47: mol_type = other RNA
tgctgacttcgcatcaaacccaattaaaaattagccctagaccctgg

SEQ ID NO: 12944 - RNA, 31 nt, synthetic construct
  source 1..31: mol_type = other RNA
ccacgttgtggactctacacccaattccaca

SEQ ID NO: 12945 - RNA, 31 nt, synthetic construct
  source 1..31: mol_type = other RNA
tgctgactctacacccaattccacagcctgg

SEQ ID NO: 12946 - RNA, 30 nt, synthetic construct
  source 1..30: mol_type = other RNA
tgcctcacacgttgcggactttgcaccaat

SEQ ID NO: 12947 - RNA, 31 nt, synthetic construct
  source 1..31: mol_type = other RNA
ccacgttgcgaactttgcatccacttccaca

SEQ ID NO: 12948 - RNA, 31 nt, synthetic construct
  source 1..31: mol_type = other RNA
cttccacgtagcggactttgcagccaattcc

SEQ ID NO: 12949 - RNA, 31 nt, synthetic construct
  source 1..31: mol_type = other RNA
tgctgactttgcagccaatcaaacggcctgg

SEQ ID NO: 12950 - RNA, 39 nt, synthetic construct
  source 1..39: mol_type = other RNA
gccaggatgccgggcacgtttcggacttcatccaattcc

SEQ ID NO: 12951 - RNA, 32 nt, synthetic construct
  source 1..32: mol_type = other RNA
cttccacttgcggaccaattgcatacaattcc

SEQ ID NO: 12952 - RNA, 50 nt, synthetic construct
  source 1..50: mol_type = other RNA
cgttgctgaccaattgcatacaatgtttccgtttgggagcaggcactgcc

SEQ ID NO: 12953 - RNA, 31 nt, synthetic construct
  source 1..31: mol_type = other RNA
ccacgttgcggactttataccaacttccaca

SEQ ID NO: 12954 - RNA, 31 nt, synthetic construct
  source 1..31: mol_type = other RNA
ccacgttgcggactttatacccaattccaca

SEQ ID NO: 12955 - RNA, 31 nt, synthetic construct
  source 1..31: mol_type = other RNA
tgctgactttgcacacaattccatagcctgg

SEQ ID NO: 12956 - RNA, 31 nt, synthetic construct
  source 1..31: mol_type = other RNA
tgctgactttgcatccaattccatagcctgg

SEQ ID NO: 12957 - RNA, 31 nt, synthetic construct
  source 1..31: mol_type = other RNA
ccacggtgcggactttgcacccaattccaca

SEQ ID NO: 12958 - RNA, 31 nt, synthetic construct
  source 1..31: mol_type = other RNA
cttccctagtgcggactttgcacccaattcc

SEQ ID NO: 12959 - RNA, 31 nt, synthetic construct
  source 1..31: mol_type = other RNA
ccacgttccggactttgcacacaattccaca

SEQ ID NO: 12960 - RNA, 31 nt, synthetic construct
  source 1..31: mol_type = other RNA
tgctgactttgcacacaattggacagcctgg

SEQ ID NO: 12961 - RNA, 31 nt, synthetic construct
  source 1..31: mol_type = other RNA
tgctgactttgctcagtcttccacagcctgg

SEQ ID NO: 12962 - RNA, 31 nt, synthetic construct
  source 1..31: mol_type = other RNA
ccacgttgcggactttgcacccaaccccaca

SEQ ID NO: 12963 - RNA, 31 nt, synthetic construct
  source 1..31: mol_type = other RNA
tgccttaaaagttgcggactttgcacccaat

SEQ ID NO: 12964 - RNA, 41 nt, synthetic construct
  source 1..41: mol_type = other RNA
cgttgctgacctttgacgcagttccacagccgggcactgcc

SEQ ID NO: 12965 - RNA, 31 nt, synthetic construct
  source 1..31: mol_type = other RNA
ccacgttgtggactttgcacaatattccaca

SEQ ID NO: 12966 - RNA, 41 nt, synthetic construct
  source 1..41: mol_type = other RNA
cgttgctggctttgcacccaattccatcgtcgagcactgcc

SEQ ID NO: 12967 - RNA, 41 nt, synthetic construct
  source 1..41: mol_type = other RNA
cttcccgattgctctaacttttttttatttgcaccaattcc

SEQ ID NO: 12968 - RNA, 33 nt, synthetic construct
  source 1..33: mol_type = other RNA
tgctggctttgctacgagaattccatggcctgg

SEQ ID NO: 12969 - RNA, 43 nt, synthetic construct
  source 1..43: mol_type = other RNA
cgttgctggctttgctacgagaattccatggccgggcactgcc

SEQ ID NO: 12970 - RNA, 31 nt, synthetic construct
  source 1..31: mol_type = other RNA
tgctgactttgcacacaattccacaacctgg

SEQ ID NO: 12971 - RNA, 33 nt, synthetic construct
  source 1..33: mol_type = other RNA
ccacgatgtggactttgcaccgaaaattccaca

SEQ ID NO: 12972 - RNA, 31 nt, synthetic construct
  source 1..31: mol_type = other RNA
tgcctcccacgatgtggactttgcacccaat

SEQ ID NO: 12973 - RNA, 31 nt, synthetic construct
  source 1..31: mol_type = other RNA
ccacgttgcggactttgtgaccaattccaca

SEQ ID NO: 12974 - RNA, 31 nt, synthetic construct
  source 1..31: mol_type = other RNA
tgctgactttgcatccaattccccggcctgg

SEQ ID NO: 12975 - RNA, 29 nt, synthetic construct
  source 1..29: mol_type = other RNA
cttccaccgcggactttgcacccgattcc

SEQ ID NO: 12976 - RNA, 41 nt, synthetic construct
  source 1..41: mol_type = other RNA
tccacgttgaggacttggcacccatttccaacgcctggcac

SEQ ID NO: 12977 - RNA, 31 nt, synthetic construct
  source 1..31: mol_type = other RNA
cttccgcgttacggactttgcacccaattcc

SEQ ID NO: 12978 - RNA, 31 nt, synthetic construct
  source 1..31: mol_type = other RNA
ccacgttgtggacttcaaacccaagtccaca

SEQ ID NO: 12979 - RNA, 41 nt, synthetic construct
  source 1..41: mol_type = other RNA
cgttgctgacttcaaacccaagtccacagccgggcactgcc

SEQ ID NO: 12980 - RNA, 41 nt, synthetic construct
  source 1..41: mol_type = other RNA
cgttgctgactttgcactcaattccatagtcgggcactgcc

SEQ ID NO: 12981 - RNA, 41 nt, synthetic construct
  source 1..41: mol_type = other RNA
cgttgctgactgtgcacaccatcccacaaacgcgcactgcc

SEQ ID NO: 12982 - RNA, 41 nt, synthetic construct
  source 1..41: mol_type = other RNA
gccaggatgccttccacgttccggacccggcacccaattcc

SEQ ID NO: 12983 - RNA, 31 nt, synthetic construct
  source 1..31: mol_type = other RNA
tgccttccacgttccggacccggcacccaat

SEQ ID NO: 12984 - RNA, 31 nt, synthetic construct
  source 1..31: mol_type = other RNA
cttccatgttgcggactttgcgaaaaattcc

SEQ ID NO: 12985 - RNA, 31 nt, synthetic construct
  source 1..31: mol_type = other RNA
ccacgttgcggactttgcacaatattccaca

SEQ ID NO: 12986 - RNA, 31 nt, synthetic construct
  source 1..31: mol_type = other RNA
cttccacgttgaggactttgcaacccattcc

SEQ ID NO: 12987 - RNA, 31 nt, synthetic construct
  source 1..31: mol_type = other RNA
tgccttaaacgtggaggactttgcaaccaat

SEQ ID NO: 12988 - RNA, 30 nt, synthetic construct
  source 1..30: mol_type = other RNA
ccacgttgcggactttgactcaattccaca

SEQ ID NO: 12989 - RNA, 31 nt, synthetic construct
  source 1..31: mol_type = other RNA
ccacgtgcggaccactgcacccaatcccaca

SEQ ID NO: 12990 - RNA, 31 nt, synthetic construct
  source 1..31: mol_type = other RNA
cttccatgtgcggaccactgcacccaattcc

SEQ ID NO: 12991 - RNA, 44 nt, synthetic construct
  source 1..44: mol_type = other RNA
cgttgctgactttgcattcaaacactgccaagcggggcactgcc

SEQ ID NO: 12992 - RNA, 31 nt, synthetic construct
  source 1..31: mol_type = other RNA
ccacgttggggactttgcactcaactccaca

SEQ ID NO: 12993 - RNA, 31 nt, synthetic construct
  source 1..31: mol_type = other RNA
cttccacgttggggactttgcactcaattcc

SEQ ID NO: 12994 - RNA, 33 nt, synthetic construct
  source 1..33: mol_type = other RNA
tgcctgccactttgcggactttagctacccaat

SEQ ID NO: 12995 - RNA, 31 nt, synthetic construct
  source 1..31: mol_type = other RNA
cttcccacgtgcggactttgcacccaattcc

SEQ ID NO: 12996 - RNA, 52 nt, synthetic construct
  source 1..52: mol_type = other RNA
ccacgttgctgacttcgcatcaaaaatgaaacccaataagaaaagatccaca

SEQ ID NO: 12997 - RNA, 54 nt, synthetic construct
  source 1..54: mol_type = other RNA
tgctgacttcgcatcaaaaatgaaacccaataagaaaagatcctacaagcctgg

SEQ ID NO: 12998 - RNA, 31 nt, synthetic construct
  source 1..31: mol_type = other RNA
cttccacgctgcgggctttgcacccaattcc

SEQ ID NO: 12999 - RNA, 31 nt, synthetic construct
  source 1..31: mol_type = other RNA
tgctggctttgcacccaattccaaagcctgg

SEQ ID NO: 13000 - RNA, 31 nt, synthetic construct
  source 1..31: mol_type = other RNA
ccacgttgcggactttgaaccccattccaca

SEQ ID NO: 13001 - RNA, 31 nt, synthetic construct
  source 1..31: mol_type = other RNA
cttccacgttgcgaactttgcatccaattcc

SEQ ID NO: 13002 - RNA, 31 nt, synthetic construct
  source 1..31: mol_type = other RNA
tgctgactttgcatccacttccatgtcctgg

SEQ ID NO: 13003 - RNA, 31 nt, synthetic construct
  source 1..31: mol_type = other RNA
cttccacgttgcggactttgcctccaattcc

SEQ ID NO: 13004 - RNA, 31 nt, synthetic construct
  source 1..31: mol_type = other RNA
ccacgtagcggactttgcagccaatcccaca

SEQ ID NO: 13005 - RNA, 31 nt, synthetic construct
  source 1..31: mol_type = other RNA
cttccacgatgtggactttgcactcaattcc

SEQ ID NO: 13006 - RNA, 31 nt, synthetic construct
  source 1..31: mol_type = other RNA
ccacgaagtggactttgcacccaattccaca

SEQ ID NO: 13007 - RNA, 29 nt, synthetic construct
  source 1..29: mol_type = other RNA
tgcctggcacgtttcggacttcatccaat

SEQ ID NO: 13008 - RNA, 31 nt, synthetic construct
  source 1..31: mol_type = other RNA
ccacgttgcggactttgcatccaattccaca

SEQ ID NO: 13009 - RNA, 33 nt, synthetic construct
  source 1..33: mol_type = other RNA
tgctgactttgcacccaattccatgacgcctgg

SEQ ID NO: 13010 - RNA, 33 nt, synthetic construct
  source 1..33: mol_type = other RNA
ccacgttgcggaccaattgcatacaatgccaca

SEQ ID NO: 13011 - RNA, 31 nt, synthetic construct
  source 1..31: mol_type = other RNA
tgctgactttgcacctaattccacggcctgg

SEQ ID NO: 13012 - RNA, 31 nt, synthetic construct
  source 1..31: mol_type = other RNA
tgctgacttggcacccccgtcagcagcctgg

SEQ ID NO: 13013 - RNA, 52 nt, synthetic construct
  source 1..52: mol_type = other RNA
ccacgttgatgaccacatcatttaccgcacagatcacatcatcacgtccaca

SEQ ID NO: 13014 - RNA, 62 nt, synthetic construct
  source 1..62: mol_type = other RNA
tccacgttgatgaccacatcatttaccgcacagatcacatcatcacgtcaacagcctggcac

SEQ ID NO: 13015 - RNA, 62 nt, synthetic construct
  source 1..62: mol_type = other RNA
atgccttccacgttgatgaccacatcatttaccgcacagatcacatcatcacgtccacagcc

SEQ ID NO: 13016 - RNA, 31 nt, synthetic construct
  source 1..31: mol_type = other RNA
ccacgtttcgaactttgtacccaattccaca

SEQ ID NO: 13017 - RNA, 31 nt, synthetic construct
  source 1..31: mol_type = other RNA
cttccacgtttcgaactttgtacccaattcc

SEQ ID NO: 13018 - RNA, 31 nt, synthetic construct
  source 1..31: mol_type = other RNA
tgccttccacgtttcgaactttgtacccaat

SEQ ID NO: 13019 - RNA, 31 nt, synthetic construct
  source 1..31: mol_type = other RNA
cttccaacttgcggactttataccaaattcc

SEQ ID NO: 13020 - RNA, 31 nt, synthetic construct
  source 1..31: mol_type = other RNA
tgctgactttatacccaattccaaagcctgg

SEQ ID NO: 13021 - RNA, 31 nt, synthetic construct
  source 1..31: mol_type = other RNA
cttccacgttgtggactttgtacataattcc

SEQ ID NO: 13022 - RNA, 31 nt, synthetic construct
  source 1..31: mol_type = other RNA
ccacgttgcggactttgcacggtgttccaca

SEQ ID NO: 13023 - RNA, 31 nt, synthetic construct
  source 1..31: mol_type = other RNA
cttccacgttccggactttgcacacaattcc

SEQ ID NO: 13024 - RNA, 30 nt, synthetic construct
  source 1..30: mol_type = other RNA
tgctgactttgaaccattaccacggcctgg

SEQ ID NO: 13025 - RNA, 40 nt, synthetic construct
  source 1..40: mol_type = other RNA
cgttgctgactttgcacccaattacacagcgggcactgcc

SEQ ID NO: 13026 - RNA, 31 nt, synthetic construct
  source 1..31: mol_type = other RNA
tgccttacatgccgcggactttgcacccaat

SEQ ID NO: 13027 - RNA, 41 nt, synthetic construct
  source 1..41: mol_type = other RNA
cgttgctgacgttccacacaattccacagtcgagcactgcc

SEQ ID NO: 13028 - RNA, 31 nt, synthetic construct
  source 1..31: mol_type = other RNA
cttccacgttgtggactttgcacccaattcc

SEQ ID NO: 13029 - RNA, 31 nt, synthetic construct
  source 1..31: mol_type = other RNA
tgccttccacgttgtgggctttgcacccaat

SEQ ID NO: 13030 - RNA, 31 nt, synthetic construct
  source 1..31: mol_type = other RNA
tgctgactttgccaacaattccaccgcctgg

SEQ ID NO: 13031 - RNA, 30 nt, synthetic construct
  source 1..30: mol_type = other RNA
cttccacttgcggactttgcacccaattcc

SEQ ID NO: 13032 - RNA, 30 nt, synthetic construct
  source 1..30: mol_type = other RNA
cttccacctgcggactttgcattcaattcc

SEQ ID NO: 13033 - RNA, 44 nt, synthetic construct
  source 1..44: mol_type = other RNA
tgctgacttttttttatttgcaccagttcgcagtttgtgcctgg

SEQ ID NO: 13034 - RNA, 54 nt, synthetic construct
  source 1..54: mol_type = other RNA
cgttgctgacttttttttatttgcaccagttcgcagtttgtgccgggcactgcc

SEQ ID NO: 13035 - RNA, 33 nt, synthetic construct
  source 1..33: mol_type = other RNA
ccacgttgcgggctttgctacgagaattccaca

SEQ ID NO: 13036 - RNA, 31 nt, synthetic construct
  source 1..31: mol_type = other RNA
ccaggtacccgtccacgtgaagggctttgca

SEQ ID NO: 13037 - RNA, 31 nt, synthetic construct
  source 1..31: mol_type = other RNA
tgctgactttgcacccaattcaatagcctgg

SEQ ID NO: 13038 - RNA, 31 nt, synthetic construct
  source 1..31: mol_type = other RNA
ccacgttgtggactttgtacctatttccaca

SEQ ID NO: 13039 - RNA, 31 nt, synthetic construct
  source 1..31: mol_type = other RNA
ccacgttccggacccggcacgcagttccaca

SEQ ID NO: 13040 - RNA, 31 nt, synthetic construct
  source 1..31: mol_type = other RNA
tgctgacccggcacgcagttccacagcctgg

SEQ ID NO: 13041 - RNA, 31 nt, synthetic construct
  source 1..31: mol_type = other RNA
tgctgactttgaattcaattccatggcctgg

SEQ ID NO: 13042 - RNA, 31 nt, synthetic construct
  source 1..31: mol_type = other RNA
tgctgactttgcgaaaaattccacagcctgg

SEQ ID NO: 13043 - RNA, 41 nt, synthetic construct
  source 1..41: mol_type = other RNA
tccacgttgaggactttgcaattaattacctagcctggcac

SEQ ID NO: 13044 - RNA, 31 nt, synthetic construct
  source 1..31: mol_type = other RNA
cttccacgtggaggactttgcaattaattcc

SEQ ID NO: 13045 - RNA, 56 nt, synthetic construct
  source 1..56: mol_type = other RNA
cgttgctgactttgactcaattccacacgccgccgtcacctattttaggcactgcc

SEQ ID NO: 13046 - RNA, 31 nt, synthetic construct
  source 1..31: mol_type = other RNA
tgctgactttgcacccaattccacagcctgg

SEQ ID NO: 13047 - RNA, 31 nt, synthetic construct
  source 1..31: mol_type = other RNA
cttccacgttgtggacttcaaacccaattcc

SEQ ID NO: 13048 - RNA, 31 nt, synthetic construct
  source 1..31: mol_type = other RNA
tgctgactgtgccttcatttccgacacctgg

SEQ ID NO: 13049 - RNA, 41 nt, synthetic construct
  source 1..41: mol_type = other RNA
cgttgctgactgtgccttcatttccgacaccgggcactgcc

SEQ ID NO: 13050 - RNA, 31 nt, synthetic construct
  source 1..31: mol_type = other RNA
tgccttccggcttgcggactgtgcctccaat

SEQ ID NO: 13051 - RNA, 34 nt, synthetic construct
  source 1..34: mol_type = other RNA
tgctgactttgcattcaaacactgccaagcctgg

SEQ ID NO: 13052 - RNA, 31 nt, synthetic construct
  source 1..31: mol_type = other RNA
tgctgactttgcgcccagatccacaacctgg

SEQ ID NO: 13053 - RNA, 31 nt, synthetic construct
  source 1..31: mol_type = other RNA
tgctgactttgccaccaattccatggcctgg

SEQ ID NO: 13054 - RNA, 52 nt, synthetic construct
  source 1..52: mol_type = other RNA
gccaggatgccttccacgttggagattacatggtcactttgccaccaattcc

SEQ ID NO: 13055 - RNA, 30 nt, synthetic construct
  source 1..30: mol_type = other RNA
ccacgtgcggactttgcacccaattccaca

SEQ ID NO: 13056 - RNA, 57 nt, synthetic construct
  source 1..57: mol_type = other RNA
tccacgttgttgacttcgcatcaaacccaattaaaaattagccctagaccctggcac

SEQ ID NO: 13057 - RNA, 56 nt, synthetic construct
  source 1..56: mol_type = other RNA
cgttgctgacttcgcatcaaacccaattaaaaattagccctagacctggcactgcc

SEQ ID NO: 13058 - RNA, 47 nt, synthetic construct
  source 1..47: mol_type = other RNA
tgccttcgaaaatagattgttttacttgcggaccaattgcatccaat

SEQ ID NO: 13059 - RNA, 62 nt, synthetic construct
  source 1..62: mol_type = other RNA
cgttgctgaccacatcatttaccgcacagatcacatcatcacgtcaacagccgggcactgcc

SEQ ID NO: 13060 - RNA, 33 nt, synthetic construct
  source 1..33: mol_type = other RNA
tgctgactttataccaacttccacacagcctgg

SEQ ID NO: 13061 - RNA, 31 nt, synthetic construct
  source 1..31: mol_type = other RNA
cttccaagttgcggactttgcacacaattcc

SEQ ID NO: 13062 - RNA, 30 nt, synthetic construct
  source 1..30: mol_type = other RNA
ccacgtgcggactttgcatccaattccaca

SEQ ID NO: 13063 - RNA, 38 nt, synthetic construct
  source 1..38: mol_type = other RNA
tgctgactttgcttccatgttttagctaccaggcctgg

SEQ ID NO: 13064 - RNA, 31 nt, synthetic construct
  source 1..31: mol_type = other RNA
ccacgtagcggacgttccacacaattccaca

SEQ ID NO: 13065 - RNA, 31 nt, synthetic construct
  source 1..31: mol_type = other RNA
ccacggtgcggacctttgacgcagttccaca

SEQ ID NO: 13066 - RNA, 31 nt, synthetic construct
  source 1..31: mol_type = other RNA
tgctgacctttgacgcagttccacagcctgg

SEQ ID NO: 13067 - RNA, 31 nt, synthetic construct
  source 1..31: mol_type = other RNA
ccacgttgtggactttgaccaaatttccaca

SEQ ID NO: 13068 - RNA, 29 nt, synthetic construct
  source 1..29: mol_type = other RNA
cttccacgttgtggactttgaccaattcc

SEQ ID NO: 13069 - RNA, 31 nt, synthetic construct
  source 1..31: mol_type = other RNA
ccacgttgtgggctttgcacccaattccaca

SEQ ID NO: 13070 - RNA, 51 nt, synthetic construct
  source 1..51: mol_type = other RNA
atgccttcgcgattgctctaacttttttttatttgcaccagttccacagcc

SEQ ID NO: 13071 - RNA, 33 nt, synthetic construct
  source 1..33: mol_type = other RNA
cttccaagttgcgggctttgctacgagaattcc

SEQ ID NO: 13072 - RNA, 31 nt, synthetic construct
  source 1..31: mol_type = other RNA
tgctgactttgcaccgaaaattccagcctgg

SEQ ID NO: 13073 - RNA, 31 nt, synthetic construct
  source 1..31: mol_type = other RNA
cttccacgcggcggactttgcatccaattcc

SEQ ID NO: 13074 - RNA, 30 nt, synthetic construct
  source 1..30: mol_type = other RNA
tgctgactttgcacccggttccctgcctgg

SEQ ID NO: 13075 - RNA, 31 nt, synthetic construct
  source 1..31: mol_type = other RNA
tgctgactttgcacatagttccccagcctgg

SEQ ID NO: 13076 - RNA, 31 nt, synthetic construct
  source 1..31: mol_type = other RNA
ccacgttgaggactttgcacccaattccaca

SEQ ID NO: 13077 - RNA, 31 nt, synthetic construct
  source 1..31: mol_type = other RNA
cttccacgttgaggactttgcactcaattcc

SEQ ID NO: 13078 - RNA, 31 nt, synthetic construct
  source 1..31: mol_type = other RNA
ccacgttgcggactttgaacccaattccaca

SEQ ID NO: 13079 - RNA, 41 nt, synthetic construct
  source 1..41: mol_type = other RNA
tccacgttccggacccggcacgcagttccacagcctggcac

SEQ ID NO: 13080 - RNA, 42 nt, synthetic construct
  source 1..42: mol_type = other RNA
cgttgctgaccactgcacccaatcccaaggctgggcactgcc

SEQ ID NO: 13081 - RNA, 52 nt, synthetic construct
  source 1..52: mol_type = other RNA
tccacgttggagattacatggtcactttgccaccaattccatggcctggcac

SEQ ID NO: 13082 - RNA, 41 nt, synthetic construct
  source 1..41: mol_type = other RNA
cgttgctggctttgcacccaattccaaagccgggcactgcc

SEQ ID NO: 13083 - RNA, 51 nt, synthetic construct
  source 1..51: mol_type = other RNA
tccacgttgctgaccaattgcatacaatgtttccgtttgggagcctggcac

SEQ ID NO: 13084 - RNA, 44 nt, synthetic construct
  source 1..44: mol_type = other RNA
tgctgactttgcacccaaccacaaagcaagcccccacagcctgg

SEQ ID NO: 13085 - RNA, 31 nt, synthetic construct
  source 1..31: mol_type = other RNA
cttccacggtgcggacctttgacgcaattcc

SEQ ID NO: 13086 - RNA, 32 nt, synthetic construct
  source 1..32: mol_type = other RNA
ccacgttctgcggctttgcacctaattccaca

SEQ ID NO: 13087 - RNA, 31 nt, synthetic construct
  source 1..31: mol_type = other RNA
tgctgactttgcacccaattccccggcctgg

SEQ ID NO: 13088 - RNA, 41 nt, synthetic construct
  source 1..41: mol_type = other RNA
cgttgctgactttgcacccaattccccggtcgagcactgcc

SEQ ID NO: 13089 - RNA, 31 nt, synthetic construct
  source 1..31: mol_type = other RNA
cttccacgttgtggacttctaacccaattcc

SEQ ID NO: 13090 - RNA, 41 nt, synthetic construct
  source 1..41: mol_type = other RNA
cgttgctgacttcaaacccaattccacagccgggcactgcc

SEQ ID NO: 13091 - RNA, 31 nt, synthetic construct
  source 1..31: mol_type = other RNA
tgctgactttgcacccaattccctggcctgg

SEQ ID NO: 13092 - RNA, 31 nt, synthetic construct
  source 1..31: mol_type = other RNA
tgctgacttggcacccatttccaacgcctgg

SEQ ID NO: 13093 - RNA, 31 nt, synthetic construct
  source 1..31: mol_type = other RNA
ccacgttgcggactgtgcacaccatcccaca

SEQ ID NO: 13094 - RNA, 32 nt, synthetic construct
  source 1..32: mol_type = other RNA
cttccgcgttgaggactttgaaccgcaattcc

SEQ ID NO: 13095 - RNA, 31 nt, synthetic construct
  source 1..31: mol_type = other RNA
tgctgactttgcaaaccattccaaaccctgg

SEQ ID NO: 13096 - RNA, 31 nt, synthetic construct
  source 1..31: mol_type = other RNA
tgccttccacgttgtggactttgccaccaat

SEQ ID NO: 13097 - RNA, 41 nt, synthetic construct
  source 1..41: mol_type = other RNA
accaccaggatgaacaagaagacgtacaccccgtagctgag

SEQ ID NO: 13098 - RNA, 41 nt, synthetic construct
  source 1..41: mol_type = other RNA
accaccaggatgaaccggaagtagaccacaccgtagctgag

SEQ ID NO: 13099 - RNA, 41 nt, synthetic construct
  source 1..41: mol_type = other RNA
accaccaggatgaagaggaagaagccaaccccgtagctgag

SEQ ID NO: 13100 - RNA, 41 nt, synthetic construct
  source 1..41: mol_type = other RNA
accaccaggctgaacaggaagaaggccatcccgtagctgag

SEQ ID NO: 13101 - RNA, 41 nt, synthetic construct
  source 1..41: mol_type = other RNA
accaccaggatgaaaaggaagagtctcaacccgtagctgag

SEQ ID NO: 13102 - RNA, 41 nt, synthetic construct
  source 1..41: mol_type = other RNA
accaccaggatgatcaggaaaaggtccaccgcgtagctgag

SEQ ID NO: 13103 - RNA, 41 nt, synthetic construct
  source 1..41: mol_type = other RNA
accaccaggatgaagcggaagaaaaccaccccgtagctgag

SEQ ID NO: 13104 - RNA, 41 nt, synthetic construct
  source 1..41: mol_type = other RNA
accaccaggatgaacaggaagcagaccaccccgtagctgag

SEQ ID NO: 13105 - RNA, 41 nt, synthetic construct
  source 1..41: mol_type = other RNA
accaccaggatgaatagggagacacccaccccgtagctgag

SEQ ID NO: 13106 - RNA, 41 nt, synthetic construct
  source 1..41: mol_type = other RNA
accaccaggatgcacaggtagaagtccactccgtagctgag

SEQ ID NO: 13107 - RNA, 41 nt, synthetic construct
  source 1..41: mol_type = other RNA
accaccaggatggacaggaagaaaattaccccatagctgag

SEQ ID NO: 13108 - RNA, 41 nt, synthetic construct
  source 1..41: mol_type = other RNA
accaccagaatgcccaggtagaagtcaacctcgtagctgag

SEQ ID NO: 13109 - RNA, 41 nt, synthetic construct
  source 1..41: mol_type = other RNA
accaccaggatgaagaggaagaagtcccctccatagctgag

SEQ ID NO: 13110 - RNA, 41 nt, synthetic construct
  source 1..41: mol_type = other RNA
accaccaggatgaacaggcagatgtcaaccccgtagctgag

SEQ ID NO: 13111 - RNA, 42 nt, synthetic construct
  source 1..42: mol_type = other RNA
accaccaggattaacaggaagaagacacaccccgtagctgag

SEQ ID NO: 13112 - RNA, 41 nt, synthetic construct
  source 1..41: mol_type = other RNA
accaccaggatgacgtggtagaaacccactccgtagctgag

SEQ ID NO: 13113 - RNA, 41 nt, synthetic construct
  source 1..41: mol_type = other RNA
accaccaggatgaacaggaagaagaccatcccgtagctgag

SEQ ID NO: 13114 - RNA, 41 nt, synthetic construct
  source 1..41: mol_type = other RNA
accaccagaatgaaaaggaagaagccaatcccgtagctgag

SEQ ID NO: 13115 - RNA, 41 nt, synthetic construct
  source 1..41: mol_type = other RNA
accaccaggatgaacaggaagaagcccatcccgtagctgag

SEQ ID NO: 13116 - RNA, 41 nt, synthetic construct
  source 1..41: mol_type = other RNA
accaccaggatgagcaggattacgcccaccccgtagctgag

SEQ ID NO: 13117 - RNA, 41 nt, synthetic construct
  source 1..41: mol_type = other RNA
accaccaggatgaaccagaaagaaccaaccccgtagctgag

SEQ ID NO: 13118 - RNA, 41 nt, synthetic construct
  source 1..41: mol_type = other RNA
accaccaggattatcaggaagaagcttaccccatagctgag

SEQ ID NO: 13119 - RNA, 31 nt, synthetic construct
  source 1..31: mol_type = other RNA
ggatgaacaggaagaggcacaccccgtagct

SEQ ID NO: 13120 - RNA, 41 nt, synthetic construct
  source 1..41: mol_type = other RNA
accaccagggtgaacaggcagaagtccaccgcgtagctgag

SEQ ID NO: 13121 - RNA, 41 nt, synthetic construct
  source 1..41: mol_type = other RNA
aacaggaagaagccacccccgtagcgggggatgcctgcata

SEQ ID NO: 13122 - RNA, 41 nt, synthetic construct
  source 1..41: mol_type = other RNA
accaccaggataaataggcaggagaccacaccgtagctgag

SEQ ID NO: 13123 - RNA, 41 nt, synthetic construct
  source 1..41: mol_type = other RNA
accaccaggatgagcaggaaacagtccaccccgtagctgag

SEQ ID NO: 13124 - RNA, 41 nt, synthetic construct
  source 1..41: mol_type = other RNA
accaccaggatgaacaggaagaagcccaatccgtagctgag

SEQ ID NO: 13125 - RNA, 41 nt, synthetic construct
  source 1..41: mol_type = other RNA
accaccaggatgaacaggaagaagtccatcccgtagctgag

SEQ ID NO: 13126 - RNA, 41 nt, synthetic construct
  source 1..41: mol_type = other RNA
accaccaggatgaacaggatgaaggccacaccgtagctgag

SEQ ID NO: 13127 - RNA, 41 nt, synthetic construct
  source 1..41: mol_type = other RNA
accaccaggatgaacaggcagaagcctaccccgtagctgag

SEQ ID NO: 13128 - RNA, 41 nt, synthetic construct
  source 1..41: mol_type = other RNA
accaccaggctgcactggcagaagccacccccgtagctgag

SEQ ID NO: 13129 - RNA, 41 nt, synthetic construct
  source 1..41: mol_type = other RNA
accaccagggtgaacaggaggaagcacgccccatagctgag

SEQ ID NO: 13130 - RNA, 41 nt, synthetic construct
  source 1..41: mol_type = other RNA
accaccagggcgaacaggaacaagcccacaccgtagctgag

SEQ ID NO: 13131 - RNA, 41 nt, synthetic construct
  source 1..41: mol_type = other RNA
aggatgaacaagaagacgtacaccccgtagcggaggatgcc

SEQ ID NO: 13132 - RNA, 41 nt, synthetic construct
  source 1..41: mol_type = other RNA
accaccaggatgaaccggcagaagcccactccgtagctgag

SEQ ID NO: 13133 - RNA, 41 nt, synthetic construct
  source 1..41: mol_type = other RNA
accaccaggatcaacagaaagaagcccaccccgtagctgag

SEQ ID NO: 13134 - RNA, 41 nt, synthetic construct
  source 1..41: mol_type = other RNA
aggatgaacaggaagaaaccctccccgtagcggaggatgcc

SEQ ID NO: 13135 - RNA, 42 nt, synthetic construct
  source 1..42: mol_type = other RNA
accaccaggatgcaacaggaagaagcccgccccgtagctgag

SEQ ID NO: 13136 - RNA, 41 nt, synthetic construct
  source 1..41: mol_type = other RNA
aggatgaacaggaagaagaccatcccgtagcgcaggatgcc

SEQ ID NO: 13137 - RNA, 41 nt, synthetic construct
  source 1..41: mol_type = other RNA
accaccaggatgaacaggaagaaaccctccccgtagctgag

SEQ ID NO: 13138 - RNA, 31 nt, synthetic construct
  source 1..31: mol_type = other RNA
ggatgcacaggtagaagtccactccgtagct

SEQ ID NO: 13139 - RNA, 41 nt, synthetic construct
  source 1..41: mol_type = other RNA
accaccaggataaacaggaagaagaccaccccgtagctgag

SEQ ID NO: 13140 - RNA, 31 nt, synthetic construct
  source 1..31: mol_type = other RNA
ggatgaagaggaagaagccaaccccgtagct

SEQ ID NO: 13141 - RNA, 31 nt, synthetic construct
  source 1..31: mol_type = other RNA
ggatgaaaaggaagaagccaatcccgtagct

SEQ ID NO: 13142 - RNA, 41 nt, synthetic construct
  source 1..41: mol_type = other RNA
accaccaggaagaacaggaagaagcctaccccatagctgag

SEQ ID NO: 13143 - RNA, 43 nt, synthetic construct
  source 1..43: mol_type = other RNA
accaccaggatgaacaggaagaaggacccatcccgtagctgag

SEQ ID NO: 13144 - RNA, 31 nt, synthetic construct
  source 1..31: mol_type = other RNA
ggatgagcaggaaacagtccaccccgtagct

SEQ ID NO: 13145 - RNA, 31 nt, synthetic construct
  source 1..31: mol_type = other RNA
ggatgaacaggaagcagaccaccccgtagct

SEQ ID NO: 13146 - RNA, 45 nt, synthetic construct
  source 1..45: mol_type = other RNA
accaccagtatgaacagaccagaagaagccctctccgtagctgag

SEQ ID NO: 13147 - RNA, 31 nt, synthetic construct
  source 1..31: mol_type = other RNA
ggatgaacaagaagacgtacaccccgtagct

SEQ ID NO: 13148 - RNA, 31 nt, synthetic construct
  source 1..31: mol_type = other RNA
ggatgaacgggaagaagcttacgccgtagct

SEQ ID NO: 13149 - RNA, 31 nt, synthetic construct
  source 1..31: mol_type = other RNA
ggatgaaccagaagaagtcgaccccgtagct

SEQ ID NO: 13150 - RNA, 41 nt, synthetic construct
  source 1..41: mol_type = other RNA
accaccaggatgagcgggaacaagtccacaccgtagctgag

SEQ ID NO: 13151 - RNA, 41 nt, synthetic construct
  source 1..41: mol_type = other RNA
aggatgaacaggtagaagtccactccgtagcgaaggatgcc

SEQ ID NO: 13152 - RNA, 31 nt, synthetic construct
  source 1..31: mol_type = other RNA
ggatgaacgggaagaagcctaccccgtagct

SEQ ID NO: 13153 - RNA, 31 nt, synthetic construct
  source 1..31: mol_type = other RNA
ggatgaacaggaagaagtccatcccgtagct

SEQ ID NO: 13154 - RNA, 31 nt, synthetic construct
  source 1..31: mol_type = other RNA
ggatgaacaggaagaaaccctccccgtagct

SEQ ID NO: 13155 - RNA, 31 nt, synthetic construct
  source 1..31: mol_type = other RNA
ggatgaacaggaagcaacccaccccgtagct

SEQ ID NO: 13156 - RNA, 32 nt, synthetic construct
  source 1..32: mol_type = other RNA
ggatgaacaggaagaagacacaccccgtagct

SEQ ID NO: 13157 - RNA, 41 nt, synthetic construct
  source 1..41: mol_type = other RNA
accaccaggatgaacagggagaagcccaccccgtagctgag

SEQ ID NO: 13158 - RNA, 31 nt, synthetic construct
  source 1..31: mol_type = other RNA
ggatgaacaggcagatgtcaaccccgtagct

SEQ ID NO: 13159 - RNA, 41 nt, synthetic construct
  source 1..41: mol_type = other RNA
aggatgaacagaaagaggcccagcccgtagcggaggatgcc

SEQ ID NO: 13160 - RNA, 31 nt, synthetic construct
  source 1..31: mol_type = other RNA
ggatgaacaggattaagcccaccccgtagct

SEQ ID NO: 13161 - RNA, 41 nt, synthetic construct
  source 1..41: mol_type = other RNA
accaccaggatgaacaggaagcaacccaccccgtagctgag

SEQ ID NO: 13162 - RNA, 41 nt, synthetic construct
  source 1..41: mol_type = other RNA
aggatgaacaggaagaaggccatcccgtagcgcaggatgcc

SEQ ID NO: 13163 - RNA, 42 nt, synthetic construct
  source 1..42: mol_type = other RNA
aggatgaacaggaagaagacacaccccgtagaggaggatgcc

SEQ ID NO: 13164 - RNA, 41 nt, synthetic construct
  source 1..41: mol_type = other RNA
accaccaggatgaacaggaagaagaccataccgtagctgag

SEQ ID NO: 13165 - RNA, 41 nt, synthetic construct
  source 1..41: mol_type = other RNA
accaccaggatgagcaggaagaagcccaccccgtagctgag

SEQ ID NO: 13166 - RNA, 41 nt, synthetic construct
  source 1..41: mol_type = other RNA
accaccaggaggagcagggggaagcccaccccgtagctgag

SEQ ID NO: 13167 - RNA, 41 nt, synthetic construct
  source 1..41: mol_type = other RNA
accaccaggatgaacaggaagaagcacaccccatagctgag

SEQ ID NO: 13168 - RNA, 41 nt, synthetic construct
  source 1..41: mol_type = other RNA
aggatgaacaggatgaaggccacaccgtagcggaggatgcc

SEQ ID NO: 13169 - RNA, 31 nt, synthetic construct
  source 1..31: mol_type = other RNA
ggatgaacaggaagaagaccatcccgtagct

SEQ ID NO: 13170 - RNA, 41 nt, synthetic construct
  source 1..41: mol_type = other RNA
accaccaggaagaacaggaagaagtccaccccgtagctgag

SEQ ID NO: 13171 - RNA, 41 nt, synthetic construct
  source 1..41: mol_type = other RNA
accaccaggatgaacagggagatgccagtctcgtagctgag

SEQ ID NO: 13172 - RNA, 31 nt, synthetic construct
  source 1..31: mol_type = other RNA
ggatgaacaggaagaaggccatcccgtagct

SEQ ID NO: 13173 - RNA, 40 nt, synthetic construct
  source 1..40: mol_type = other RNA
accaccaggagaacaggaagaggcacaccccgtagctgag

SEQ ID NO: 13174 - RNA, 41 nt, synthetic construct
  source 1..41: mol_type = other RNA
accaccaggatgcacaggaagcagcccaccccgtagctgag

SEQ ID NO: 13175 - RNA, 41 nt, synthetic construct
  source 1..41: mol_type = other RNA
accaccaggatgaacaggctgaagcccgccccgtagctgag

SEQ ID NO: 13176 - RNA, 41 nt, synthetic construct
  source 1..41: mol_type = other RNA
aggatgaacagaaagaagcccaccccgtagcggaggatgcc

SEQ ID NO: 13177 - RNA, 41 nt, synthetic construct
  source 1..41: mol_type = other RNA
accaccaggatgaacgggaagaagcctaccccgtagctgag

SEQ ID NO: 13178 - RNA, 31 nt, synthetic construct
  source 1..31: mol_type = other RNA
ggatgaacaggaagaagcccaatccgtagct

SEQ ID NO: 13179 - RNA, 41 nt, synthetic construct
  source 1..41: mol_type = other RNA
aggatgaacaggaagcaacccaccccgtagcgaaggatgcc

SEQ ID NO: 13180 - RNA, 41 nt, synthetic construct
  source 1..41: mol_type = other RNA
aacaggaagaagccgaccccgtagcggtggatgcctgcata

SEQ ID NO: 13181 - RNA, 41 nt, synthetic construct
  source 1..41: mol_type = other RNA
accaccaggatgaacaggcataagcccaccccgtagctgag

SEQ ID NO: 13182 - RNA, 31 nt, synthetic construct
  source 1..31: mol_type = other RNA
ggatgaacaggcagaagcctaccccgtagct

SEQ ID NO: 13183 - RNA, 41 nt, synthetic construct
  source 1..41: mol_type = other RNA
aggatgaacaggattaagcccaccccgtagcggaggatgcc

SEQ ID NO: 13184 - RNA, 41 nt, synthetic construct
  source 1..41: mol_type = other RNA
aggatgaacaggaagcagcccaccccgtagcggaggatgcc

SEQ ID NO: 13185 - RNA, 41 nt, synthetic construct
  source 1..41: mol_type = other RNA
accaccaggacgaacaggaagatgcccaccccgtagctgag

SEQ ID NO: 13186 - RNA, 31 nt, synthetic construct
  source 1..31: mol_type = other RNA
ggatgaacaggaagaagaccaccccgtagct

SEQ ID NO: 13187 - RNA, 41 nt, synthetic construct
  source 1..41: mol_type = other RNA
aggatgaacagggggaagcccaccccgtaggggaggatgcc

SEQ ID NO: 13188 - RNA, 41 nt, synthetic construct
  source 1..41: mol_type = other RNA
aggatgaacaggaagaagtccatcccgtagcgcaggatgcc

SEQ ID NO: 13189 - RNA, 31 nt, synthetic construct
  source 1..31: mol_type = other RNA
ggatgaaccggcagaagcccactccgtagct

SEQ ID NO: 13190 - RNA, 41 nt, synthetic construct
  source 1..41: mol_type = other RNA
aggatgaacaggaagaggcacaccccgtagtggaggatgcc

SEQ ID NO: 13191 - RNA, 41 nt, synthetic construct
  source 1..41: mol_type = other RNA
accaccagaatgaacaggaagaagcccaccccgtagctgag

SEQ ID NO: 13192 - RNA, 41 nt, synthetic construct
  source 1..41: mol_type = other RNA
accaccaggatgaacaggaagaagcccaccccgtagctgag

SEQ ID NO: 13193 - RNA, 41 nt, synthetic construct
  source 1..41: mol_type = other RNA
aggatgaatagggagacacccaccccgtagcggaggatgcc

SEQ ID NO: 13194 - RNA, 41 nt, synthetic construct
  source 1..41: mol_type = other RNA
accaccaggatgaaaaggagtaagcccaccccgtagctgag

SEQ ID NO: 13195 - RNA, 41 nt, synthetic construct
  source 1..41: mol_type = other RNA
accaccaggatgagcgggcagaagtccaccccgtagctgag

SEQ ID NO: 13196 - RNA, 42 nt, synthetic construct
  source 1..42: mol_type = other RNA
accaccaggatgaacaggaagaaagcccaccccgtagctgag

SEQ ID NO: 13197 - RNA, 41 nt, synthetic construct
  source 1..41: mol_type = other RNA
accaccagggtgaacaggaagaagcccgccccgtagctgag

SEQ ID NO: 13198 - RNA, 35 nt, synthetic construct
  source 1..35: mol_type = other RNA
ggatgaacagaccagaagaagccctctccgtagct

SEQ ID NO: 13199 - RNA, 41 nt, synthetic construct
  source 1..41: mol_type = other RNA
aggatgaagcggaagaaaaccaccccgtagcggaggatgcc

SEQ ID NO: 13200 - RNA, 41 nt, synthetic construct
  source 1..41: mol_type = other RNA
aggatgaacaggcagaagcctaccccgttgtggaggatgcc

SEQ ID NO: 13201 - RNA, 40 nt, synthetic construct
  source 1..40: mol_type = other RNA
accaccaggatgaacaggaaaagccaaccccatagctgag

SEQ ID NO: 13202 - RNA, 41 nt, synthetic construct
  source 1..41: mol_type = other RNA
aggatgaacaggaagaagcccaccccgtagtggaggatgcc

SEQ ID NO: 13203 - RNA, 31 nt, synthetic construct
  source 1..31: mol_type = other RNA
ggatgaacaggaaagggcttcccccgtagct

SEQ ID NO: 13204 - RNA, 41 nt, synthetic construct
  source 1..41: mol_type = other RNA
aggatgaacaggaaacagtccaccccgtagcggaggatgcc

SEQ ID NO: 13205 - RNA, 41 nt, synthetic construct
  source 1..41: mol_type = other RNA
accaccaggatgaaaaggactaaacccaccccatagctgag

SEQ ID NO: 13206 - RNA, 41 nt, synthetic construct
  source 1..41: mol_type = other RNA
aacaggaagaagccctctccgtagagaaggatgcctgcata

SEQ ID NO: 13207 - RNA, 41 nt, synthetic construct
  source 1..41: mol_type = other RNA
aggatgaacaggaagaagcccgccccgaagtggaggatgcc

SEQ ID NO: 13208 - RNA, 31 nt, synthetic construct
  source 1..31: mol_type = other RNA
ggatgaacagggagaagcccaccccgtagct

SEQ ID NO: 13209 - RNA, 31 nt, synthetic construct
  source 1..31: mol_type = other RNA
ggatgagcaggattacgcccaccccgtagct

SEQ ID NO: 13210 - RNA, 41 nt, synthetic construct
  source 1..41: mol_type = other RNA
aggatgaaccagaagaagtcgaccccgcagtggaggatgcc

SEQ ID NO: 13211 - RNA, 41 nt, synthetic construct
  source 1..41: mol_type = other RNA
aggatgaaaaggagtaagcccaccccgtagcggaggatgcc

SEQ ID NO: 13212 - RNA, 41 nt, synthetic construct
  source 1..41: mol_type = other RNA
aggatgaacaggaagaagcccaatccgtagcggaggatgcc

SEQ ID NO: 13213 - RNA, 41 nt, synthetic construct
  source 1..41: mol_type = other RNA
aacaggaagaagcccaccccgtagtggaggatgcctgcata

SEQ ID NO: 13214 - RNA, 41 nt, synthetic construct
  source 1..41: mol_type = other RNA
accaccaggatgaacaggaagaagcccaccccatagctgag

SEQ ID NO: 13215 - RNA, 31 nt, synthetic construct
  source 1..31: mol_type = other RNA
ggatgaatagggagacacccaccccgtagct

SEQ ID NO: 13216 - RNA, 41 nt, synthetic construct
  source 1..41: mol_type = other RNA
aggatgaacaggaagcagaccaccccgtagcgaaggatgcc

SEQ ID NO: 13217 - RNA, 41 nt, synthetic construct
  source 1..41: mol_type = other RNA
aggatgaacaggaaaaagcccaccccgtcgtggaggatgcc

SEQ ID NO: 13218 - RNA, 41 nt, synthetic construct
  source 1..41: mol_type = other RNA
accaccaggatgaacaggaaaaagcccaccccatagctgag

SEQ ID NO: 13219 - RNA, 31 nt, synthetic construct
  source 1..31: mol_type = other RNA
ggatgaacaggatgaaggccacaccgtagct

SEQ ID NO: 13220 - RNA, 41 nt, synthetic construct
  source 1..41: mol_type = other RNA
aggatgaaaaggaagaagccaatcccgtagcgcaggatgcc

SEQ ID NO: 13221 - RNA, 41 nt, synthetic construct
  source 1..41: mol_type = other RNA
aggatgaacaggcagatgtcaaccccgtaacggaggatgcc

SEQ ID NO: 13222 - RNA, 41 nt, synthetic construct
  source 1..41: mol_type = other RNA
accaccaggatgaacaggattaagcccaccccgtagctgag

SEQ ID NO: 13223 - RNA, 31 nt, synthetic construct
  source 1..31: mol_type = other RNA
ggatgaacaggctgaagcccgccccgtagct

SEQ ID NO: 13224 - RNA, 41 nt, synthetic construct
  source 1..41: mol_type = other RNA
aacaggaagaagcccaccccgtagtggtcgatgcctgcata

SEQ ID NO: 13225 - RNA, 41 nt, synthetic construct
  source 1..41: mol_type = other RNA
aggatgaactggcagaagccacccccgtagcggaggatgcc

SEQ ID NO: 13226 - RNA, 41 nt, synthetic construct
  source 1..41: mol_type = other RNA
accaccaggatgaatacgaagaagcccacctcgtagctgag

SEQ ID NO: 13227 - RNA, 41 nt, synthetic construct
  source 1..41: mol_type = other RNA
accaccaggatggaccggaagaagcccgccccatagctgag

SEQ ID NO: 13228 - RNA, 41 nt, synthetic construct
  source 1..41: mol_type = other RNA
accaccaggacgaacagcaagcagcccagcccatagctgag

SEQ ID NO: 13229 - RNA, 33 nt, synthetic construct
  source 1..33: mol_type = other RNA
ggatgaacaggaagaaggacccatcccgtagct

SEQ ID NO: 13230 - RNA, 41 nt, synthetic construct
  source 1..41: mol_type = other RNA
aggatgaacaggaagaagcccaccccgtagcggaggatgcc

SEQ ID NO: 13231 - RNA, 41 nt, synthetic construct
  source 1..41: mol_type = other RNA
accaccaggcagaaccagaagaagtcgaccccgtagctgag

SEQ ID NO: 13232 - RNA, 42 nt, synthetic construct
  source 1..42: mol_type = other RNA
aacaggaagaagacacaccccgtagaggaagatgcctgcata

SEQ ID NO: 13233 - RNA, 41 nt, synthetic construct
  source 1..41: mol_type = other RNA
aacaggaagaagcccaccccgtaggggaggctgcctgcata

SEQ ID NO: 13234 - RNA, 31 nt, synthetic construct
  source 1..31: mol_type = other RNA
ggatgagcgggcagaagtccaccccgtagct

SEQ ID NO: 13235 - RNA, 42 nt, synthetic construct
  source 1..42: mol_type = other RNA
aggatgaacaggaagaaagcccaccccgtagaggaggatgcc

SEQ ID NO: 13236 - RNA, 41 nt, synthetic construct
  source 1..41: mol_type = other RNA
accaccaggatgaccaggaagaagcccaccacgtagctgag

SEQ ID NO: 13237 - RNA, 31 nt, synthetic construct
  source 1..31: mol_type = other RNA
ggatgatcaggaaaaggtccaccgcgtagct

SEQ ID NO: 13238 - RNA, 41 nt, synthetic construct
  source 1..41: mol_type = other RNA
accaccaggctgaatgggaagaaacccaccccatagctgag

SEQ ID NO: 13239 - RNA, 41 nt, synthetic construct
  source 1..41: mol_type = other RNA
accaccaggatgagcagggggaagcccaccccgtagctgag

SEQ ID NO: 13240 - RNA, 31 nt, synthetic construct
  source 1..31: mol_type = other RNA
ggatgaaaaggagtaagcccaccccgtagct

SEQ ID NO: 13241 - RNA, 41 nt, synthetic construct
  source 1..41: mol_type = other RNA
aggatgaacgggaagaagcctaccccgtagcggaggatgcc

SEQ ID NO: 13242 - RNA, 41 nt, synthetic construct
  source 1..41: mol_type = other RNA
accaccaggatgagccggaagaagcccaccccgtagctgag

SEQ ID NO: 13243 - RNA, 31 nt, synthetic construct
  source 1..31: mol_type = other RNA
ggatgaaaaggaagagtctcaacccgtagct

SEQ ID NO: 13244 - RNA, 31 nt, synthetic construct
  source 1..31: mol_type = other RNA
ggatgaacagaaagaagcccaccccgtagct

SEQ ID NO: 13245 - RNA, 31 nt, synthetic construct
  source 1..31: mol_type = other RNA
ggatgaacaggcagaagtccaccgcgtagct

SEQ ID NO: 13246 - RNA, 41 nt, synthetic construct
  source 1..41: mol_type = other RNA
aggatgaagtggtagaaacccactccgtagcgaaggatgcc

SEQ ID NO: 13247 - RNA, 41 nt, synthetic construct
  source 1..41: mol_type = other RNA
aggatgaacaggaaaaggtccaccgcgtagcggaggatgcc

SEQ ID NO: 13248 - RNA, 41 nt, synthetic construct
  source 1..41: mol_type = other RNA
aggatgaaccggaagaagcccaccccgtagcggaggatgcc

SEQ ID NO: 13249 - RNA, 42 nt, synthetic construct
  source 1..42: mol_type = other RNA
aggatgaacaggaagaagcccaccccgtagcgggaggatgcc

SEQ ID NO: 13250 - RNA, 31 nt, synthetic construct
  source 1..31: mol_type = other RNA
ggatgaagcggaagaaaaccaccccgtagct

SEQ ID NO: 13251 - RNA, 41 nt, synthetic construct
  source 1..41: mol_type = other RNA
aggatgaacaggaagaagcccaccccatagcggaggatgcc

SEQ ID NO: 13252 - RNA, 41 nt, synthetic construct
  source 1..41: mol_type = other RNA
aacaggaagaagacctccccgtagtggaggatgcctgcata

SEQ ID NO: 13253 - RNA, 31 nt, synthetic construct
  source 1..31: mol_type = other RNA
ggatgaacaggaagaagcctaccccatagct

SEQ ID NO: 13254 - RNA, 41 nt, synthetic construct
  source 1..41: mol_type = other RNA
accaccagactgaacaggaagaagcccaccccgtagctgag

SEQ ID NO: 13255 - RNA, 41 nt, synthetic construct
  source 1..41: mol_type = other RNA
aggatgaacaggaagaagtccaccccgcagtggaggatgcc

SEQ ID NO: 13256 - RNA, 41 nt, synthetic construct
  source 1..41: mol_type = other RNA
aacaggaagaagcctaccccgttgtggaggatgcctgcata

SEQ ID NO: 13257 - RNA, 41 nt, synthetic construct
  source 1..41: mol_type = other RNA
aggatgaacaggaagatgcccaccccgtagcggaggatgcc

SEQ ID NO: 13258 - RNA, 41 nt, synthetic construct
  source 1..41: mol_type = other RNA
accaccaggatgaacaggaagaaccccaccccgtagctgag

SEQ ID NO: 13259 - RNA, 31 nt, synthetic construct
  source 1..31: mol_type = other RNA
agaagatcaccccatagcggagggtgcctgc

SEQ ID NO: 13260 - RNA, 41 nt, synthetic construct
  source 1..41: mol_type = other RNA
aggatgaaccggaagtagaccacaccgtagcggaggatgcc

SEQ ID NO: 13261 - RNA, 31 nt, synthetic construct
  source 1..31: mol_type = other RNA
ggatgaacagcaagcagcccagcccatagct

SEQ ID NO: 13262 - RNA, 41 nt, synthetic construct
  source 1..41: mol_type = other RNA
accaccaggatgaacaggaaaaagcccaccccgtagctgag

SEQ ID NO: 13263 - RNA, 41 nt, synthetic construct
  source 1..41: mol_type = other RNA
aggatgaacgggaagaagcccaccccgtagagaaggatgcc

SEQ ID NO: 13264 - RNA, 31 nt, synthetic construct
  source 1..31: mol_type = other RNA
ggatgaacaggcataagcccaccccgtagct

SEQ ID NO: 13265 - RNA, 31 nt, synthetic construct
  source 1..31: mol_type = other RNA
ggatgagcagggggaagcccaccccgtagct

SEQ ID NO: 13266 - RNA, 41 nt, synthetic construct
  source 1..41: mol_type = other RNA
aggatgaacaggaagaagcccatcccgtcgcgcaggatgcc

SEQ ID NO: 13267 - RNA, 41 nt, synthetic construct
  source 1..41: mol_type = other RNA
aggatgaacaggattacgcccaccccgtagcgaaggatgcc

SEQ ID NO: 13268 - RNA, 31 nt, synthetic construct
  source 1..31: mol_type = other RNA
ggatgaacaggaagaagcacaccccatagct

SEQ ID NO: 13269 - RNA, 31 nt, synthetic construct
  source 1..31: mol_type = other RNA
ggatgaacaggaagaagcccgccccgtagct

SEQ ID NO: 13270 - RNA, 45 nt, synthetic construct
  source 1..45: mol_type = other RNA
aggatgaacagaccagaagaagccctctccgtagagaaggatgcc

SEQ ID NO: 13271 - RNA, 53 nt, synthetic construct
  source 1..53: mol_type = other RNA
aggatgaaccggcagaagcccactccgtagcgaaaaaaaaaaaagaggatgcc

SEQ ID NO: 13272 - RNA, 41 nt, synthetic construct
  source 1..41: mol_type = other RNA
aggatgaacaggctgaagcccgccccgtaggggaggatgcc

SEQ ID NO: 13273 - RNA, 40 nt, synthetic construct
  source 1..40: mol_type = other RNA
aggatgaacaggtagaagtcaacctcgtagcgaggatgcc

SEQ ID NO: 13274 - RNA, 31 nt, synthetic construct
  source 1..31: mol_type = other RNA
ggatgaagaggaagaagtcccctccatagct

SEQ ID NO: 13275 - RNA, 31 nt, synthetic construct
  source 1..31: mol_type = other RNA
ggatgaaccggaagtagaccacaccgtagct

SEQ ID NO: 13276 - RNA, 41 nt, synthetic construct
  source 1..41: mol_type = other RNA
aggatgaacaggaagaagcccaccccgtaggggaggatgcc

SEQ ID NO: 13277 - RNA, 41 nt, synthetic construct
  source 1..41: mol_type = other RNA
aggatgaaagggaagaagcccaccccgaagcggaggatgcc

SEQ ID NO: 13278 - RNA, 31 nt, synthetic construct
  source 1..31: mol_type = other RNA
ggatgaaagggaagaagcccgacccgtagct

SEQ ID NO: 13279 - RNA, 41 nt, synthetic construct
  source 1..41: mol_type = other RNA
accaccaggatgaacaggcggaagtccaccccatagctgag

SEQ ID NO: 13280 - RNA, 31 nt, synthetic construct
  source 1..31: mol_type = other RNA
ggatgacgtggtagaaacccactccgtagct

SEQ ID NO: 13281 - RNA, 41 nt, synthetic construct
  source 1..41: mol_type = other RNA
aacaggaagaggcccagcccgtagcggaggctgcctgcata

SEQ ID NO: 13282 - RNA, 40 nt, synthetic construct
  source 1..40: mol_type = other RNA
accaccaggatgataggaggacgcccaccccgtagctgag

SEQ ID NO: 13283 - RNA, 41 nt, synthetic construct
  source 1..41: mol_type = other RNA
aacaggaaacagtccaccccgtagcggaggatgcctgcata

SEQ ID NO: 13284 - RNA, 41 nt, synthetic construct
  source 1..41: mol_type = other RNA
accaccaggatgaaagggaagaagcccaccccgtagctgag

SEQ ID NO: 13285 - RNA, 32 nt, synthetic construct
  source 1..32: mol_type = other RNA
ggatgaacaggaagaaagcccaccccgtagct

SEQ ID NO: 13286 - RNA, 41 nt, synthetic construct
  source 1..41: mol_type = other RNA
aacaggaagaagcccaccccgtaggggaggatgcctgcata

SEQ ID NO: 13287 - RNA, 31 nt, synthetic construct
  source 1..31: mol_type = other RNA
ggatgaataggcaggagaccacaccgtagct

SEQ ID NO: 13288 - RNA, 41 nt, synthetic construct
  source 1..41: mol_type = other RNA
agcccaccccatagcgaaggatgccggcatacacactgccc

SEQ ID NO: 13289 - RNA, 41 nt, synthetic construct
  source 1..41: mol_type = other RNA
aacaggaagcaacccaccccgtagcgaagggtgcctgcata

SEQ ID NO: 13290 - RNA, 41 nt, synthetic construct
  source 1..41: mol_type = other RNA
aggatgaatacgaagaagcccacctcgtagcggaggatgcc

SEQ ID NO: 13291 - RNA, 31 nt, synthetic construct
  source 1..31: mol_type = other RNA
ggatgaacaggaagaagtccaccccgtagct

SEQ ID NO: 13292 - RNA, 41 nt, synthetic construct
  source 1..41: mol_type = other RNA
aacaggaagaagcccaccccgtagaggaggatgcctgcata

SEQ ID NO: 13293 - RNA, 41 nt, synthetic construct
  source 1..41: mol_type = other RNA
aggatgaacaggcagaagtccaccgcgtagcggaggatgcc

SEQ ID NO: 13294 - RNA, 41 nt, synthetic construct
  source 1..41: mol_type = other RNA
aacaggaagaagcccaccccatagtggaggatgcctgcata

SEQ ID NO: 13295 - RNA, 31 nt, synthetic construct
  source 1..31: mol_type = other RNA
ggatgaacaggaggaagcccaccccgtagct

SEQ ID NO: 13296 - RNA, 41 nt, synthetic construct
  source 1..41: mol_type = other RNA
aacaggaagaagcccaccccgtagcggaggatgcctgcata

SEQ ID NO: 13297 - RNA, 41 nt, synthetic construct
  source 1..41: mol_type = other RNA
aggatgaacaggaagaagaccaccccgtagcgcaggatgcc

SEQ ID NO: 13298 - RNA, 41 nt, synthetic construct
  source 1..41: mol_type = other RNA
aacaggaagaagtccactccgtagcgaaggatgcctgcata

SEQ ID NO: 13299 - RNA, 41 nt, synthetic construct
  source 1..41: mol_type = other RNA
aggatgaacaggcataagcccaccccgtagcgaaggatgcc

SEQ ID NO: 13300 - RNA, 31 nt, synthetic construct
  source 1..31: mol_type = other RNA
ggatgaacaggaagatgcccaccccgtagct

SEQ ID NO: 13301 - RNA, 41 nt, synthetic construct
  source 1..41: mol_type = other RNA
accaccagtatgaacgggaagaagcccaccccgtagctgag

SEQ ID NO: 13302 - RNA, 41 nt, synthetic construct
  source 1..41: mol_type = other RNA
aggatgaacagggagaagcccaccccgtcccggaggatgcc

SEQ ID NO: 13303 - RNA, 41 nt, synthetic construct
  source 1..41: mol_type = other RNA
accaccagtatgaacaggaggaagcccaccccgtagctgag

SEQ ID NO: 13304 - RNA, 41 nt, synthetic construct
  source 1..41: mol_type = other RNA
aacaggaagaagcccaccccgtagagaaggatgcctgcata

SEQ ID NO: 13305 - RNA, 39 nt, synthetic construct
  source 1..39: mol_type = other RNA
aacaggaagaagtcgaccccgcagtgggatgcctgcata

SEQ ID NO: 13306 - RNA, 31 nt, synthetic construct
  source 1..31: mol_type = other RNA
ggatgaacaggaaaaagcccaccccgtagct

SEQ ID NO: 13307 - RNA, 41 nt, synthetic construct
  source 1..41: mol_type = other RNA
aggatgaacgggaagaagcccactccatagcggaggatgcc

SEQ ID NO: 13308 - RNA, 42 nt, synthetic construct
  source 1..42: mol_type = other RNA
aacaggaagaagcctaccccgtagcggagtgatgcctgcata

SEQ ID NO: 13309 - RNA, 31 nt, synthetic construct
  source 1..31: mol_type = other RNA
ggatgcactggcagaagccacccccgtagct

SEQ ID NO: 13310 - RNA, 46 nt, synthetic construct
  source 1..46: mol_type = other RNA
aacaggaagaagaccatcccgtagcgcgagaagcgaggcctgcata

SEQ ID NO: 13311 - RNA, 31 nt, synthetic construct
  source 1..31: mol_type = other RNA
ggatgaacaggaagaagcccatcccgtagct

SEQ ID NO: 13312 - RNA, 45 nt, synthetic construct
  source 1..45: mol_type = other RNA
aacaggaagaaaaccaccccgtagcggagaaaaaatgcctgcata

SEQ ID NO: 13313 - RNA, 31 nt, synthetic construct
  source 1..31: mol_type = other RNA
ggatgaatacgaagaagcccacctcgtagct

SEQ ID NO: 13314 - RNA, 41 nt, synthetic construct
  source 1..41: mol_type = other RNA
aacaggaatacgcccaccccgtagcgaaggatgcctgcata

SEQ ID NO: 13315 - RNA, 41 nt, synthetic construct
  source 1..41: mol_type = other RNA
aggatgaataggaggacgcccaccccgtagcgaaggatgcc

SEQ ID NO: 13316 - RNA, 31 nt, synthetic construct
  source 1..31: mol_type = other RNA
ggatggacaggaagaaaattaccccatagct

SEQ ID NO: 13317 - RNA, 42 nt, synthetic construct
  source 1..42: mol_type = other RNA
aacaggaagaaagcccaccccgtagaggtagacacctgcata

SEQ ID NO: 13318 - RNA, 41 nt, synthetic construct
  source 1..41: mol_type = other RNA
accaccagaatgacacggaaaaagcacaccccatagctgag

SEQ ID NO: 13319 - RNA, 41 nt, synthetic construct
  source 1..41: mol_type = other RNA
aggatgaacaggaagaagcccaccccgtagaggaggatgcc

SEQ ID NO: 13320 - RNA, 41 nt, synthetic construct
  source 1..41: mol_type = other RNA
aggatgaacaggaataagcccaccccatagcggaggatgcc

SEQ ID NO: 13321 - RNA, 41 nt, synthetic construct
  source 1..41: mol_type = other RNA
aacaggaagaagcccaccacgtagcggaggatgcctgcata

SEQ ID NO: 13322 - RNA, 41 nt, synthetic construct
  source 1..41: mol_type = other RNA
aacaggaagaagcccgacccgtagcgggggatgcctgcata

SEQ ID NO: 13323 - RNA, 41 nt, synthetic construct
  source 1..41: mol_type = other RNA
aacaggaagatgtcaaccccgtaacgggtgatgcctgcata

SEQ ID NO: 13324 - RNA, 31 nt, synthetic construct
  source 1..31: mol_type = other RNA
ggatgagcaggaagaagcccaccccgtagct

SEQ ID NO: 13325 - RNA, 41 nt, synthetic construct
  source 1..41: mol_type = other RNA
aacaggaagaagcccaccccgtagcggaagatgcctgcata

SEQ ID NO: 13326 - RNA, 31 nt, synthetic construct
  source 1..31: mol_type = other RNA
ggatgaacaggaagaaccccaccccgtagct

SEQ ID NO: 13327 - RNA, 41 nt, synthetic construct
  source 1..41: mol_type = other RNA
aacaggaagaggcacaccccgtagtggaaaatgcctgcata

SEQ ID NO: 13328 - RNA, 41 nt, synthetic construct
  source 1..41: mol_type = other RNA
aacaggaagaagcccaccccatagaggaggatgcctgcata

SEQ ID NO: 13329 - RNA, 41 nt, synthetic construct
  source 1..41: mol_type = other RNA
aggatgaacaggaagaagcccaccccgtagagaaggatgcc

SEQ ID NO: 13330 - RNA, 41 nt, synthetic construct
  source 1..41: mol_type = other RNA
aacaggaagaagtccaccccgcagtgggggatgcctgcata

SEQ ID NO: 13331 - RNA, 41 nt, synthetic construct
  source 1..41: mol_type = other RNA
aacaggaagaagcctaccccatagcggaggatgcctgcata

SEQ ID NO: 13332 - RNA, 41 nt, synthetic construct
  source 1..41: mol_type = other RNA
aacaggaagaagcccaccccgtcccggaggatgcctgcata

SEQ ID NO: 13333 - RNA, 31 nt, synthetic construct
  source 1..31: mol_type = other RNA
ggatgaacaggaagaagcccaccccgtagct

SEQ ID NO: 13334 - RNA, 41 nt, synthetic construct
  source 1..41: mol_type = other RNA
aacaggaagcagaccaccccgtagcgaagggagcctgcata

SEQ ID NO: 13335 - RNA, 31 nt, synthetic construct
  source 1..31: mol_type = other RNA
ggatgaacaggaaaaagcccaccccatagct

SEQ ID NO: 13336 - RNA, 41 nt, synthetic construct
  source 1..41: mol_type = other RNA
aggatgaaaaggaagagtctcaacccgtagtggaggatgcc

SEQ ID NO: 13337 - RNA, 41 nt, synthetic construct
  source 1..41: mol_type = other RNA
aacaggaagatgcccaccccgtagcggaggatgcctgcata

SEQ ID NO: 13338 - RNA, 31 nt, synthetic construct
  source 1..31: mol_type = other RNA
ggatgagcgggaacaagtccacaccgtagct

SEQ ID NO: 13339 - RNA, 31 nt, synthetic construct
  source 1..31: mol_type = other RNA
acaggaagaagccgaccccgtagcggaggat

SEQ ID NO: 13340 - RNA, 31 nt, synthetic construct
  source 1..31: mol_type = other RNA
ggatgaacgggaagaagcccaccccgtagct

SEQ ID NO: 13341 - RNA, 31 nt, synthetic construct
  source 1..31: mol_type = other RNA
ggatgaacaggaggaagcacgccccatagct

SEQ ID NO: 13342 - RNA, 41 nt, synthetic construct
  source 1..41: mol_type = other RNA
aacaggaagcagcccaccccgtagcggaggatgcctgcata

SEQ ID NO: 13343 - RNA, 41 nt, synthetic construct
  source 1..41: mol_type = other RNA
agcccaccgcgtagcggggtatgccggtatagacactgccc

SEQ ID NO: 13344 - RNA, 41 nt, synthetic construct
  source 1..41: mol_type = other RNA
aggatgaacaggaagaagcccaccccgtcgggaaggatgcc

SEQ ID NO: 13345 - RNA, 41 nt, synthetic construct
  source 1..41: mol_type = other RNA
agcccaccccatagcggaggaagccggcatacacactgccc

SEQ ID NO: 13346 - RNA, 41 nt, synthetic construct
  source 1..41: mol_type = other RNA
agcccaccccgtagcgtaggatgccggcatacacactgccc

SEQ ID NO: 13347 - RNA, 31 nt, synthetic construct
  source 1..31: mol_type = other RNA
acaggaagaagcccgccccgaagtggaggat

SEQ ID NO: 13348 - RNA, 42 nt, synthetic construct
  source 1..42: mol_type = other RNA
aacaggaagaaacccactccgtagcgaaggactgcctgcata

SEQ ID NO: 13349 - RNA, 41 nt, synthetic construct
  source 1..41: mol_type = other RNA
aacaggaagaggcccagcccgtagcggcggctgcctgcata

SEQ ID NO: 13350 - RNA, 31 nt, synthetic construct
  source 1..31: mol_type = other RNA
ggatgagccggaagaagcccaccccgtagct

SEQ ID NO: 13351 - RNA, 41 nt, synthetic construct
  source 1..41: mol_type = other RNA
aggatgaacaggaagaagcccgccccgtacaggaggatgcc

SEQ ID NO: 13352 - RNA, 31 nt, synthetic construct
  source 1..31: mol_type = other RNA
ggatgcacaggaagcagcccaccccgtagct

SEQ ID NO: 13353 - RNA, 31 nt, synthetic construct
  source 1..31: mol_type = other RNA
ggatgaacaggaagaagcccaccccatagct

SEQ ID NO: 13354 - RNA, 41 nt, synthetic construct
  source 1..41: mol_type = other RNA
aacaggaataagcccaccccgtagcgggggatgcctgcata

SEQ ID NO: 13355 - RNA, 30 nt, synthetic construct
  source 1..30: mol_type = other RNA
ggatgacgggaagaagcccactccatagct

SEQ ID NO: 13356 - RNA, 41 nt, synthetic construct
  source 1..41: mol_type = other RNA
aacaggaagaagcccaccccgaagcggaggatgcctgcata

SEQ ID NO: 13357 - RNA, 41 nt, synthetic construct
  source 1..41: mol_type = other RNA
aacaggaagaaaccctccccgtagcggaggaaacctgcata

SEQ ID NO: 13358 - RNA, 46 nt, synthetic construct
  source 1..46: mol_type = other RNA
aacaggaagaagccaatcccgtagcgcaagaagggatgcctgcata

SEQ ID NO: 13359 - RNA, 31 nt, synthetic construct
  source 1..31: mol_type = other RNA
ggatgaatgggaagaaacccaccccatagct

SEQ ID NO: 13360 - RNA, 31 nt, synthetic construct
  source 1..31: mol_type = other RNA
ggatgcccaggtagaagtcaacctcgtagct

SEQ ID NO: 13361 - RNA, 40 nt, synthetic construct
  source 1..40: mol_type = other RNA
accaccaggatgacgggaagaagcccactccatagctgag

SEQ ID NO: 13362 - RNA, 31 nt, synthetic construct
  source 1..31: mol_type = other RNA
ggatgaaccagaaagaaccaaccccgtagct

SEQ ID NO: 13363 - RNA, 41 nt, synthetic construct
  source 1..41: mol_type = other RNA
aacaggaagacgcccaccccgtagcgtgggatgcctgcata

SEQ ID NO: 13364 - RNA, 31 nt, synthetic construct
  source 1..31: mol_type = other RNA
acaggaagaagcccaccccgtagtggaggat

SEQ ID NO: 13365 - RNA, 41 nt, synthetic construct
  source 1..41: mol_type = other RNA
aacaggaagaaccccaccccgtagtggagactgcctgcata

SEQ ID NO: 13366 - RNA, 41 nt, synthetic construct
  source 1..41: mol_type = other RNA
agcccaccccatagaggaggatgccgtcatacacactgccc

SEQ ID NO: 13367 - RNA, 41 nt, synthetic construct
  source 1..41: mol_type = other RNA
aagaagccgaccccgtagcggtggatgtcggcatacacact

SEQ ID NO: 13368 - RNA, 41 nt, synthetic construct
  source 1..41: mol_type = other RNA
aggatgaacaggaggaagcccaccccgtagcggaggatgcc

SEQ ID NO: 13369 - RNA, 41 nt, synthetic construct
  source 1..41: mol_type = other RNA
aacaggaataagcccaccccatagcggaggatgcctgcata

SEQ ID NO: 13370 - RNA, 41 nt, synthetic construct
  source 1..41: mol_type = other RNA
aggatgaacaggaagaagcctaccccatagcggaggatgcc

SEQ ID NO: 13371 - RNA, 41 nt, synthetic construct
  source 1..41: mol_type = other RNA
aggatgaaccagaaagaaccaaccccgtagcggaggatgcc

SEQ ID NO: 13372 - RNA, 41 nt, synthetic construct
  source 1..41: mol_type = other RNA
aacaggaataagcccaccccgtagcgaaggatgcctgcata

SEQ ID NO: 13373 - RNA, 41 nt, synthetic construct
  source 1..41: mol_type = other RNA
aggatgaacaggaagaagcccaccccatagtggaggatgcc

SEQ ID NO: 13374 - RNA, 31 nt, synthetic construct
  source 1..31: mol_type = other RNA
acaggaagaagcccaccccatagaggaggat

SEQ ID NO: 13375 - RNA, 41 nt, synthetic construct
  source 1..41: mol_type = other RNA
aggatgaacaggaagaagaccataccgtagcggaggatgcc

SEQ ID NO: 13376 - RNA, 41 nt, synthetic construct
  source 1..41: mol_type = other RNA
agcccaccccgtagcggaggaaaccggcatacacactgccc

SEQ ID NO: 13377 - RNA, 37 nt, synthetic construct
  source 1..37: mol_type = other RNA
aacaggaagacgtacaccccgtagcggggcctgcata

SEQ ID NO: 13378 - RNA, 41 nt, synthetic construct
  source 1..41: mol_type = other RNA
aacaggaagaagcccacctcgtagcggaggatgcctgcata

SEQ ID NO: 13379 - RNA, 41 nt, synthetic construct
  source 1..41: mol_type = other RNA
aacaggaagaaacccaccccatagaggcgggtgcctgcata

SEQ ID NO: 13380 - RNA, 41 nt, synthetic construct
  source 1..41: mol_type = other RNA
aacaggaagacacccaccccgtagcggaggatgcctgcata

SEQ ID NO: 13381 - RNA, 41 nt, synthetic construct
  source 1..41: mol_type = other RNA
aacaggaagcagcccaacccatagtggaggatgcctgcata

SEQ ID NO: 13382 - RNA, 41 nt, synthetic construct
  source 1..41: mol_type = other RNA
aacaggaagaagcccactccatagcggaagatgcctgcata

SEQ ID NO: 13383 - RNA, 41 nt, synthetic construct
  source 1..41: mol_type = other RNA
aggatgaacaggaagaaccccaccccgtagtggaggatgcc

SEQ ID NO: 13384 - RNA, 42 nt, synthetic construct
  source 1..42: mol_type = other RNA
agcccaccccatagcggagtgatgccggcatacacactgccc

SEQ ID NO: 13385 - RNA, 41 nt, synthetic construct
  source 1..41: mol_type = other RNA
aacaggaagaagaccaccccgtagcgcaggatgcctgcata

SEQ ID NO: 13386 - RNA, 44 nt, synthetic construct
  source 1..44: mol_type = other RNA
aacaggaagaagcccaatccgtagcggacagggacgcctgcata

SEQ ID NO: 13387 - RNA, 31 nt, synthetic construct
  source 1..31: mol_type = other RNA
acaggaagaagcccaccccgtaggggaggat

SEQ ID NO: 13388 - RNA, 31 nt, synthetic construct
  source 1..31: mol_type = other RNA
ggaagaggcccagcccgtagcggcggatgcc

SEQ ID NO: 13389 - RNA, 41 nt, synthetic construct
  source 1..41: mol_type = other RNA
agcccaccccgtagcgcaggatgttggcatacacactgccc

SEQ ID NO: 13390 - RNA, 41 nt, synthetic construct
  source 1..41: mol_type = other RNA
aacaggaagaagaccataccgtagcggaggatgcctgcata

SEQ ID NO: 13391 - RNA, 43 nt, synthetic construct
  source 1..43: mol_type = other RNA
ggaagaagcccactccgtagcgaaaaaaaaaaaagaggatgcc

SEQ ID NO: 13392 - RNA, 53 nt, synthetic construct
  source 1..53: mol_type = other RNA
aacaggaagaagcccactccgtagcgaaaaaaaaaaaagaggatgcctgcata

SEQ ID NO: 13393 - RNA, 41 nt, synthetic construct
  source 1..41: mol_type = other RNA
agcccaccccgtagcgtgggatgccggcatacacactgccc

SEQ ID NO: 13394 - RNA, 41 nt, synthetic construct
  source 1..41: mol_type = other RNA
accaccagtatgaacaggaagaagcccaccccatagctgag

SEQ ID NO: 13395 - RNA, 41 nt, synthetic construct
  source 1..41: mol_type = other RNA
agcccaccccgtaggggaggagaccggcatacacactgccc

SEQ ID NO: 13396 - RNA, 41 nt, synthetic construct
  source 1..41: mol_type = other RNA
agcccaccccgtagcgggggatgccggcgtacacactgccc

SEQ ID NO: 13397 - RNA, 41 nt, synthetic construct
  source 1..41: mol_type = other RNA
agcccaccccgtagcgaagggagccggcatacacactgccc

SEQ ID NO: 13398 - RNA, 31 nt, synthetic construct
  source 1..31: mol_type = other RNA
ggatgaacaggcggaagtccaccccatagct

SEQ ID NO: 13399 - RNA, 41 nt, synthetic construct
  source 1..41: mol_type = other RNA
aacaggaagaaggccacaccgtagcgggggatgcctgcata

SEQ ID NO: 13400 - RNA, 41 nt, synthetic construct
  source 1..41: mol_type = other RNA
aacaggaagaggcccagcccatagcggaggatgcctgcata

SEQ ID NO: 13401 - RNA, 41 nt, synthetic construct
  source 1..41: mol_type = other RNA
aggatgaacaggaagaagcacaccccacagtggaggatgcc

SEQ ID NO: 13402 - RNA, 41 nt, synthetic construct
  source 1..41: mol_type = other RNA
aacaggaagaagcacgccccatagcggagaatgcctgcata

SEQ ID NO: 13403 - RNA, 41 nt, synthetic construct
  source 1..41: mol_type = other RNA
aacaggaagaagcccaccccgtagcggattatgcctgcata

SEQ ID NO: 13404 - RNA, 41 nt, synthetic construct
  source 1..41: mol_type = other RNA
aggatgaacaggaagaagcccaccacgtagcggaggatgcc

SEQ ID NO: 13405 - RNA, 42 nt, synthetic construct
  source 1..42: mol_type = other RNA
aggatgaacaaggaagcagcccaacccatagtggaggatgcc

SEQ ID NO: 13406 - RNA, 41 nt, synthetic construct
  source 1..41: mol_type = other RNA
aggatgaacgggaacaagtccacaccgtagcggaggatgcc

SEQ ID NO: 13407 - RNA, 41 nt, synthetic construct
  source 1..41: mol_type = other RNA
agcccaccccatagcggaggatgccggcatacacactgccc

SEQ ID NO: 13408 - RNA, 41 nt, synthetic construct
  source 1..41: mol_type = other RNA
agcccaccccgtagagaaggatgccggcatacacactgccc

SEQ ID NO: 13409 - RNA, 41 nt, synthetic construct
  source 1..41: mol_type = other RNA
accaccaggagaaacaggaaggagcccaactcatagctgag

SEQ ID NO: 13410 - RNA, 31 nt, synthetic construct
  source 1..31: mol_type = other RNA
ggatgaacaggaacaagcccacaccgtagct

SEQ ID NO: 13411 - RNA, 41 nt, synthetic construct
  source 1..41: mol_type = other RNA
agcccaccccgtagcggaggatgacggcatacacactgccc

SEQ ID NO: 13412 - RNA, 41 nt, synthetic construct
  source 1..41: mol_type = other RNA
agcccaccccgtagcgaagggtgcaggcatacacactgccc

SEQ ID NO: 13413 - RNA, 41 nt, synthetic construct
  source 1..41: mol_type = other RNA
aacaggaagaagcccgccccgaagtggcagaatcctgcata

SEQ ID NO: 13414 - RNA, 46 nt, synthetic construct
  source 1..46: mol_type = other RNA
aacaggaagaagtccatcccgtagcgcgagaaggtatgcctgcata

SEQ ID NO: 13415 - RNA, 31 nt, synthetic construct
  source 1..31: mol_type = other RNA
ggatggaccggaagaagcccgccccatagct

SEQ ID NO: 13416 - RNA, 41 nt, synthetic construct
  source 1..41: mol_type = other RNA
agcccaccccacagtggaggatgccgggatacacactgccc

SEQ ID NO: 13417 - RNA, 41 nt, synthetic construct
  source 1..41: mol_type = other RNA
agcccaccccatagcggagaatgccggcatacacactgccc

SEQ ID NO: 13418 - RNA, 31 nt, synthetic construct
  source 1..31: mol_type = other RNA
ggatgaacaggaataagcccaccccatagct

SEQ ID NO: 13419 - RNA, 47 nt, synthetic construct
  source 1..47: mol_type = other RNA
agcccaccccgtagcgcaagaagggatgccggctatacacactgccc

SEQ ID NO: 13420 - RNA, 43 nt, synthetic construct
  source 1..43: mol_type = other RNA
agcccaccccgtagcggagaaaatgccggcataaacactgccc

SEQ ID NO: 13421 - RNA, 31 nt, synthetic construct
  source 1..31: mol_type = other RNA
acaggaagaaaaccaccccgtagcggaggat

SEQ ID NO: 13422 - RNA, 40 nt, synthetic construct
  source 1..40: mol_type = other RNA
accaccaggagaacaggaataagcccaccccatagctgag

SEQ ID NO: 13423 - RNA, 41 nt, synthetic construct
  source 1..41: mol_type = other RNA
aacaggaataagcccaccccgtagcggcggatgcctgcata

SEQ ID NO: 13424 - RNA, 41 nt, synthetic construct
  source 1..41: mol_type = other RNA
aggatgaaagggaagaagcccgacccgtagcggaggatgcc

SEQ ID NO: 13425 - RNA, 41 nt, synthetic construct
  source 1..41: mol_type = other RNA
aggatgaacgggcagaagtccaccccgttgcggaggatgcc

SEQ ID NO: 13426 - RNA, 31 nt, synthetic construct
  source 1..31: mol_type = other RNA
ggaagaagtccactccgtagcgaaggatgcc

SEQ ID NO: 13427 - RNA, 41 nt, synthetic construct
  source 1..41: mol_type = other RNA
aggatgaacaggaagaggcccagcccatagcggaggatgcc

SEQ ID NO: 13428 - RNA, 41 nt, synthetic construct
  source 1..41: mol_type = other RNA
aagaagcccaccccgtaggggaggctgccggcatacacact

SEQ ID NO: 13429 - RNA, 31 nt, synthetic construct
  source 1..31: mol_type = other RNA
ggatgatcaggaagaagcttaccccatagct

SEQ ID NO: 13430 - RNA, 41 nt, synthetic construct
  source 1..41: mol_type = other RNA
aacaggaagaagcccaccccgtagcgggagatgcctgcata

SEQ ID NO: 13431 - RNA, 41 nt, synthetic construct
  source 1..41: mol_type = other RNA
aggatgaacaggaaaaagcccaccccatagcggaggatgcc

SEQ ID NO: 13432 - RNA, 41 nt, synthetic construct
  source 1..41: mol_type = other RNA
aggatgaacagggagatgccagtctcgtagaggaggatgcc

SEQ ID NO: 13433 - RNA, 31 nt, synthetic construct
  source 1..31: mol_type = other RNA
ggatgaacagggagatgccagtctcgtagct

SEQ ID NO: 13434 - RNA, 41 nt, synthetic construct
  source 1..41: mol_type = other RNA
agcccaccccgtagcgggggatgccggtatacacactgccc

SEQ ID NO: 13435 - RNA, 46 nt, synthetic construct
  source 1..46: mol_type = other RNA
aacaggaagaagcccatcccgtcgcgcgagaaggaatgcctgcata

SEQ ID NO: 13436 - RNA, 31 nt, synthetic construct
  source 1..31: mol_type = other RNA
ggatgaacaggaaggagcccaactcatagct

SEQ ID NO: 13437 - RNA, 41 nt, synthetic construct
  source 1..41: mol_type = other RNA
agcccaccccgtagcgaaggatgccggcatccacactgccc

SEQ ID NO: 13438 - RNA, 41 nt, synthetic construct
  source 1..41: mol_type = other RNA
aggatgaacaggaggaagcacgccccatagcggaggatgcc

SEQ ID NO: 13439 - RNA, 41 nt, synthetic construct
  source 1..41: mol_type = other RNA
accaccaggctgaacgggaagaagcccaccccatagctgag

SEQ ID NO: 13440 - RNA, 32 nt, synthetic construct
  source 1..32: mol_type = other RNA
ggatgcaacaggaagaagcccgccccgtagct

SEQ ID NO: 13441 - RNA, 31 nt, synthetic construct
  source 1..31: mol_type = other RNA
ggaagaagcccaccccgtagcggcggatgcc

SEQ ID NO: 13442 - RNA, 41 nt, synthetic construct
  source 1..41: mol_type = other RNA
accaccaggatgaacaggcagaagtcccccgcatagctgag

SEQ ID NO: 13443 - RNA, 43 nt, synthetic construct
  source 1..43: mol_type = other RNA
accaccaggatggccaggaagaaccatacccttcgtagctgag

SEQ ID NO: 13444 - RNA, 30 nt, synthetic construct
  source 1..30: mol_type = other RNA
ggatgataggaggacgcccaccccgtagct

SEQ ID NO: 13445 - RNA, 41 nt, synthetic construct
  source 1..41: mol_type = other RNA
aacaggaagaagcccgccccgtacaggaggatgcctgcata

SEQ ID NO: 13446 - RNA, 41 nt, synthetic construct
  source 1..41: mol_type = other RNA
agcccaccgcatagcggagcatgccggtatatacactgccc

SEQ ID NO: 13447 - RNA, 31 nt, synthetic construct
  source 1..31: mol_type = other RNA
acaggaagaagcccaccccgtagagaaggat

SEQ ID NO: 13448 - RNA, 41 nt, synthetic construct
  source 1..41: mol_type = other RNA
agcccaccccatagtggaggatgccggcatacacactgccc

SEQ ID NO: 13449 - RNA, 42 nt, synthetic construct
  source 1..42: mol_type = other RNA
aacaggaagagtctcaacccgtagtggagtgatgcctgcata

SEQ ID NO: 13450 - RNA, 41 nt, synthetic construct
  source 1..41: mol_type = other RNA
aagaagccacccccgtagcgggggatgccggcgtacacact

SEQ ID NO: 13451 - RNA, 31 nt, synthetic construct
  source 1..31: mol_type = other RNA
ccaccccgtagcgaagggtgcaggcatacac

SEQ ID NO: 13452 - RNA, 41 nt, synthetic construct
  source 1..41: mol_type = other RNA
agcccaccccgtagcggaggaatccggcatacacactgccc

SEQ ID NO: 13453 - RNA, 41 nt, synthetic construct
  source 1..41: mol_type = other RNA
aacaggaaaaggtccaccgcgtagcggggtatgcctgcata

SEQ ID NO: 13454 - RNA, 41 nt, synthetic construct
  source 1..41: mol_type = other RNA
aacaggaagcagcccagcccatagcggaaggtgcctgcata

SEQ ID NO: 13455 - RNA, 41 nt, synthetic construct
  source 1..41: mol_type = other RNA
aacaggaagaagcccaccccgtcgggaccgatgcctgcata

SEQ ID NO: 13456 - RNA, 57 nt, synthetic construct
  source 1..57: mol_type = other RNA
aacaggaagaagcccaccccgtagcggcggactgagtagctgggattagcctgcata

SEQ ID NO: 13457 - RNA, 41 nt, synthetic construct
  source 1..41: mol_type = other RNA
aacaggaagaagcccaccccatagcggagaatgcctgcata

SEQ ID NO: 13458 - RNA, 41 nt, synthetic construct
  source 1..41: mol_type = other RNA
agcccaccccgtagcgggggatgccggcatacacactgccc

SEQ ID NO: 13459 - RNA, 41 nt, synthetic construct
  source 1..41: mol_type = other RNA
aggatgaaccggaagaagcccgccccatagcggaggatgcc

SEQ ID NO: 13460 - RNA, 39 nt, synthetic construct
  source 1..39: mol_type = other RNA
agcccaccccgtaggagaatgccggcatacacactgccc

SEQ ID NO: 13461 - RNA, 46 nt, synthetic construct
  source 1..46: mol_type = other RNA
accaccaggagaactcgaaagggaagaagcccgacccgtagctgag

SEQ ID NO: 13462 - RNA, 42 nt, synthetic construct
  source 1..42: mol_type = other RNA
aacaggaagaaccaaccccgtagcggagaaaatgcctgcata

SEQ ID NO: 13463 - RNA, 41 nt, synthetic construct
  source 1..41: mol_type = other RNA
agcccaccccgtagaggtagacagcggcatacacactgccc

SEQ ID NO: 13464 - RNA, 41 nt, synthetic construct
  source 1..41: mol_type = other RNA
aacaggaagatgccagtctcgtagaggcggatgcctgcata

SEQ ID NO: 13465 - RNA, 41 nt, synthetic construct
  source 1..41: mol_type = other RNA
aacaggaagaagtccaccgcgtagcggggtatgcctgcata

SEQ ID NO: 13466 - RNA, 41 nt, synthetic construct
  source 1..41: mol_type = other RNA
aggatgaacaggcggaagtccaccccatagcgaaggatgcc

SEQ ID NO: 13467 - RNA, 31 nt, synthetic construct
  source 1..31: mol_type = other RNA
acaggaagaagcccaccccatagcggaggat

SEQ ID NO: 13468 - RNA, 41 nt, synthetic construct
  source 1..41: mol_type = other RNA
agcccaccccgtagcggaggatgccggcatacacactgccc

SEQ ID NO: 13469 - RNA, 31 nt, synthetic construct
  source 1..31: mol_type = other RNA
ggatgaacgggaagaagcccaccccatagct

SEQ ID NO: 13470 - RNA, 40 nt, synthetic construct
  source 1..40: mol_type = other RNA
aggatgaacaggaaaagccaaccccatagcggaggatgcc

SEQ ID NO: 13471 - RNA, 31 nt, synthetic construct
  source 1..31: mol_type = other RNA
acaggaagaagcccaccacgtagcggaggat

SEQ ID NO: 13472 - RNA, 40 nt, synthetic construct
  source 1..40: mol_type = other RNA
accaccaggattagcgggaaaaagtcaccccatagctgag

SEQ ID NO: 13473 - RNA, 31 nt, synthetic construct
  source 1..31: mol_type = other RNA
acaggaaacagtccaccccgtagcggaggat

SEQ ID NO: 13474 - RNA, 41 nt, synthetic construct
  source 1..41: mol_type = other RNA
agcccaccccgtagtggagactgccggcgtacacactgccc

SEQ ID NO: 13475 - RNA, 41 nt, synthetic construct
  source 1..41: mol_type = other RNA
agcccaccccgtagagaaggatgccggcgtacacactgccc

SEQ ID NO: 13476 - RNA, 31 nt, synthetic construct
  source 1..31: mol_type = other RNA
ggaagaagcccaccccgtagcgaaggatgcc

SEQ ID NO: 13477 - RNA, 31 nt, synthetic construct
  source 1..31: mol_type = other RNA
ccaccccgtagcggaggatgccggcatacac

SEQ ID NO: 13478 - RNA, 41 nt, synthetic construct
  source 1..41: mol_type = other RNA
aggatgaatgggaagaaacccaccccatagaggaggatgcc

SEQ ID NO: 13479 - RNA, 42 nt, synthetic construct
  source 1..42: mol_type = other RNA
agcccaccccgtagtggagtgatgacgacatacacactgccc

SEQ ID NO: 13480 - RNA, 31 nt, synthetic construct
  source 1..31: mol_type = other RNA
ggatgaaaaggactaaacccaccccatagct

SEQ ID NO: 13481 - RNA, 41 nt, synthetic construct
  source 1..41: mol_type = other RNA
aagaagccctccccgtagcggaggaaaccggcatacacact

SEQ ID NO: 13482 - RNA, 41 nt, synthetic construct
  source 1..41: mol_type = other RNA
aggatgaacagcaagcagcccagcccatagcggaggatgcc

SEQ ID NO: 13483 - RNA, 31 nt, synthetic construct
  source 1..31: mol_type = other RNA
acaggaagaagacctccccgtagtggaggat

SEQ ID NO: 13484 - RNA, 39 nt, synthetic construct
  source 1..39: mol_type = other RNA
aacaggaaggagaccacaccgtaggagaatgcctgcata

SEQ ID NO: 13485 - RNA, 46 nt, synthetic construct
  source 1..46: mol_type = other RNA
aacaggaagaaggccatcccgtagcgcgagaagggatgcctgcata

SEQ ID NO: 13486 - RNA, 41 nt, synthetic construct
  source 1..41: mol_type = other RNA
aggatgaacaggaagaaaattaccccataacggaggatgcc

SEQ ID NO: 13487 - RNA, 31 nt, synthetic construct
  source 1..31: mol_type = other RNA
ggaagaagcccaccccgtagcggaggatgcc

SEQ ID NO: 13488 - RNA, 31 nt, synthetic construct
  source 1..31: mol_type = other RNA
acaggaagaagtccaccccgcagtggaggat

SEQ ID NO: 13489 - RNA, 31 nt, synthetic construct
  source 1..31: mol_type = other RNA
ggaagaaacccaccccatagaggcggatgcc

SEQ ID NO: 13490 - RNA, 31 nt, synthetic construct
  source 1..31: mol_type = other RNA
ggaagaagcccgccccgaagtggcagatgcc

SEQ ID NO: 13491 - RNA, 62 nt, synthetic construct
  source 1..62: mol_type = other RNA
aagaagcccatcccgtagcacgagaagggatgcccacaattctgcagctggcaatacacact

SEQ ID NO: 13492 - RNA, 31 nt, synthetic construct
  source 1..31: mol_type = other RNA
ccaccccgtagcgggggatgccggcatacac

SEQ ID NO: 13493 - RNA, 31 nt, synthetic construct
  source 1..31: mol_type = other RNA
ggaagaagcccaccccatagtggaggatgcc

SEQ ID NO: 13494 - RNA, 41 nt, synthetic construct
  source 1..41: mol_type = other RNA
aacaggaagaagcccgccccgtaggggaggagacctgcata

SEQ ID NO: 13495 - RNA, 41 nt, synthetic construct
  source 1..41: mol_type = other RNA
aggatgaacaggcagaagcccgccccctaggggaggatgcc

SEQ ID NO: 13496 - RNA, 31 nt, synthetic construct
  source 1..31: mol_type = other RNA
acaggaagaagtcgaccccgcagtggaggat

SEQ ID NO: 13497 - RNA, 39 nt, synthetic construct
  source 1..39: mol_type = other RNA
agcccaccccgtagcggattatgccggtacgcactgccc

SEQ ID NO: 13498 - RNA, 31 nt, synthetic construct
  source 1..31: mol_type = other RNA
ggaagtagaccacaccgtagcggaggatgcc

SEQ ID NO: 13499 - RNA, 41 nt, synthetic construct
  source 1..41: mol_type = other RNA
accaccaggatgaagaggggtccgccttcttcgtagctgag

SEQ ID NO: 13500 - RNA, 41 nt, synthetic construct
  source 1..41: mol_type = other RNA
agcccaccccgtagcggaagatgccggcatatgcactgccc

SEQ ID NO: 13501 - RNA, 31 nt, synthetic construct
  source 1..31: mol_type = other RNA
ggaagaagcccaccccgtagcgggggatgcc

SEQ ID NO: 13502 - RNA, 31 nt, synthetic construct
  source 1..31: mol_type = other RNA
ggaagaagcccaccccgtagcgggagatgcc

SEQ ID NO: 13503 - RNA, 31 nt, synthetic construct
  source 1..31: mol_type = other RNA
acaggaaaaagcccaccccgtcgtggaggat

SEQ ID NO: 13504 - RNA, 41 nt, synthetic construct
  source 1..41: mol_type = other RNA
agcccaccccatagaggcgggtgccgtcatacacactgccc

SEQ ID NO: 13505 - RNA, 31 nt, synthetic construct
  source 1..31: mol_type = other RNA
ggaagaagcccaccccgtagcggattatgcc

SEQ ID NO: 13506 - RNA, 39 nt, synthetic construct
  source 1..39: mol_type = other RNA
aggatgaataggcaggagaccacaccgtaggaggatgcc

SEQ ID NO: 13507 - RNA, 41 nt, synthetic construct
  source 1..41: mol_type = other RNA
aggatgaaaaggaaggagcccaccccataagggaggatgcc

SEQ ID NO: 13508 - RNA, 47 nt, synthetic construct
  source 1..47: mol_type = other RNA
agcccaccccgtagcgcgagaagcgaggccgcgcatacacactgccc

SEQ ID NO: 13509 - RNA, 38 nt, synthetic construct
  source 1..38: mol_type = other RNA
accaccaggatgaacaggaagcccaacccatagctgag

SEQ ID NO: 13510 - RNA, 41 nt, synthetic construct
  source 1..41: mol_type = other RNA
aagaagcccaccccgtagcgtgggatgccggcatacacact

SEQ ID NO: 13511 - RNA, 31 nt, synthetic construct
  source 1..31: mol_type = other RNA
ccaccccatagcggaggaagccggcatacac

SEQ ID NO: 13512 - RNA, 31 nt, synthetic construct
  source 1..31: mol_type = other RNA
acaggaagaagcccgccccatagcggaggat

SEQ ID NO: 13513 - RNA, 31 nt, synthetic construct
  source 1..31: mol_type = other RNA
ggatgacacggaaaaagcacaccccatagct

SEQ ID NO: 13514 - RNA, 31 nt, synthetic construct
  source 1..31: mol_type = other RNA
acaggaggaagcccaccccgtagcggaggat

SEQ ID NO: 13515 - RNA, 31 nt, synthetic construct
  source 1..31: mol_type = other RNA
ggatgaccaggaagaagcccaccacgtagct

SEQ ID NO: 13516 - RNA, 39 nt, synthetic construct
  source 1..39: mol_type = other RNA
aagaagcccacaccgtaggagaatgccggcatacacact

SEQ ID NO: 13517 - RNA, 41 nt, synthetic construct
  source 1..41: mol_type = other RNA
agcccaccgcgtagcggggtatgccggtatacacactgccc

SEQ ID NO: 13518 - RNA, 31 nt, synthetic construct
  source 1..31: mol_type = other RNA
acaggaagaagcccaccccgtagcggaggat

SEQ ID NO: 13519 - RNA, 41 nt, synthetic construct
  source 1..41: mol_type = other RNA
aacaggaagaagcccgccccatagcggaggaagcctgcata

SEQ ID NO: 13520 - RNA, 41 nt, synthetic construct
  source 1..41: mol_type = other RNA
aggatgaacgggaagaagcccaccccatagaggaggatgcc

SEQ ID NO: 13521 - RNA, 41 nt, synthetic construct
  source 1..41: mol_type = other RNA
agcccaccccgtcccggaggatgctgacttacacactgccc

SEQ ID NO: 13522 - RNA, 31 nt, synthetic construct
  source 1..31: mol_type = other RNA
ccaccccgtagcgaaggatgccggcatacac

SEQ ID NO: 13523 - RNA, 42 nt, synthetic construct
  source 1..42: mol_type = other RNA
accaccaggaaaaacaggaagcagcccacttcagtagctgag

SEQ ID NO: 13524 - RNA, 31 nt, synthetic construct
  source 1..31: mol_type = other RNA
ggaagaagcccaccccgtagaggaggatgcc

SEQ ID NO: 13525 - RNA, 31 nt, synthetic construct
  source 1..31: mol_type = other RNA
acaggaagaagcccaccccgtagaggaggat

SEQ ID NO: 13526 - RNA, 31 nt, synthetic construct
  source 1..31: mol_type = other RNA
ggaagaagcccaccccgtaggggaggatgcc

SEQ ID NO: 13527 - RNA, 31 nt, synthetic construct
  source 1..31: mol_type = other RNA
acaggaagatgcccaccccgtagcggaggat

SEQ ID NO: 13528 - RNA, 41 nt, synthetic construct
  source 1..41: mol_type = other RNA
agcccaccccgtagcggcggatgccggtatactcactgccc

SEQ ID NO: 13529 - RNA, 31 nt, synthetic construct
  source 1..31: mol_type = other RNA
ccaccccgtagcggaggatgctggcatacac

SEQ ID NO: 13530 - RNA, 31 nt, synthetic construct
  source 1..31: mol_type = other RNA
acaggaagaagcccaccccgaagcggaggat

SEQ ID NO: 13531 - RNA, 41 nt, synthetic construct
  source 1..41: mol_type = other RNA
agcccaccccatagtggaggatgccggtatacacactgccc

SEQ ID NO: 13532 - RNA, 41 nt, synthetic construct
  source 1..41: mol_type = other RNA
agcccaccccgtagcgaaggatgccggaataaacactgccc

SEQ ID NO: 13533 - RNA, 31 nt, synthetic construct
  source 1..31: mol_type = other RNA
acaggaagaagtccatcccgtagcgcaggat

SEQ ID NO: 13534 - RNA, 31 nt, synthetic construct
  source 1..31: mol_type = other RNA
acaggaagaagcccactccatagcggaggat

SEQ ID NO: 13535 - RNA, 32 nt, synthetic construct
  source 1..32: mol_type = other RNA
ggatgaacaggaagcagcccacttcagtagct

SEQ ID NO: 13536 - RNA, 31 nt, synthetic construct
  source 1..31: mol_type = other RNA
ggatgaacaggcagaagcccgccccctagct

SEQ ID NO: 13537 - RNA, 39 nt, synthetic construct
  source 1..39: mol_type = other RNA
agcccaccccgcagtgggatgccggcgtacacactgccc

SEQ ID NO: 13538 - RNA, 41 nt, synthetic construct
  source 1..41: mol_type = other RNA
aacaggaaaaagcccaccccgtcgtggacgatgcctgcata

SEQ ID NO: 13539 - RNA, 41 nt, synthetic construct
  source 1..41: mol_type = other RNA
accaccaggatgaaaaggaagaggctcgacccatagctgag

SEQ ID NO: 13540 - RNA, 31 nt, synthetic construct
  source 1..31: mol_type = other RNA
ggatgaacaggaagaagaccataccgtagct

SEQ ID NO: 13541 - RNA, 31 nt, synthetic construct
  source 1..31: mol_type = other RNA
acagggagacacccaccccgtagcggaggat

SEQ ID NO: 13542 - RNA, 31 nt, synthetic construct
  source 1..31: mol_type = other RNA
ggatgaaagggaagaagcccaccccgtagct

SEQ ID NO: 13543 - RNA, 31 nt, synthetic construct
  source 1..31: mol_type = other RNA
acaggaagaagcccaatccgtagcggaggat

SEQ ID NO: 13544 - RNA, 31 nt, synthetic construct
  source 1..31: mol_type = other RNA
acaggaagaagcccacctcgtagcggaggat

SEQ ID NO: 13545 - RNA, 31 nt, synthetic construct
  source 1..31: mol_type = other RNA
ccaccccgtagcggaggctgccggcatacac

SEQ ID NO: 13546 - RNA, 40 nt, synthetic construct
  source 1..40: mol_type = other RNA
accaccaggatcatcagcaaggagcttatccgtagctgag

SEQ ID NO: 13547 - RNA, 43 nt, synthetic construct
  source 1..43: mol_type = other RNA
aagaagccaaccccgtagcggagaaaatgccggcatacacact

SEQ ID NO: 13548 - RNA, 46 nt, synthetic construct
  source 1..46: mol_type = other RNA
agcccaccccgtagcggagaaaaaatgtcgtgtgtacacactgccc

SEQ ID NO: 13549 - RNA, 31 nt, synthetic construct
  source 1..31: mol_type = other RNA
ccaccccgtagcgtaggatgccggcatacac

SEQ ID NO: 13550 - RNA, 31 nt, synthetic construct
  source 1..31: mol_type = other RNA
ccaccccgtagcgagggatgccggcatacac

SEQ ID NO: 13551 - RNA, 31 nt, synthetic construct
  source 1..31: mol_type = other RNA
acaggaagaagcccaccccatagtggaggat

SEQ ID NO: 13552 - RNA, 41 nt, synthetic construct
  source 1..41: mol_type = other RNA
aacaggaagaagcacaccccacagtggaggatgcctgcata

SEQ ID NO: 13553 - RNA, 41 nt, synthetic construct
  source 1..41: mol_type = other RNA
aacaggaaaaagcccaccccatagcggaggatgcctgcata

SEQ ID NO: 13554 - RNA, 30 nt, synthetic construct
  source 1..30: mol_type = other RNA
ggatgaacaggaaaagccaaccccatagct

SEQ ID NO: 13555 - RNA, 31 nt, synthetic construct
  source 1..31: mol_type = other RNA
acaggaagaagaccataccgtagcggaggat

SEQ ID NO: 13556 - RNA, 41 nt, synthetic construct
  source 1..41: mol_type = other RNA
agcccaccccatagcggaggatgccggaatacacactgccc

SEQ ID NO: 13557 - RNA, 31 nt, synthetic construct
  source 1..31: mol_type = other RNA
ccaccccgtagcggcggatgccggtatacac

SEQ ID NO: 13558 - RNA, 32 nt, synthetic construct
  source 1..32: mol_type = other RNA
ggaagaagcctaccccgtagcggagtgatgcc

SEQ ID NO: 13559 - RNA, 31 nt, synthetic construct
  source 1..31: mol_type = other RNA
acaggcagaagccacccccgtagcggaggat

SEQ ID NO: 13560 - RNA, 41 nt, synthetic construct
  source 1..41: mol_type = other RNA
agcccaccccgtaggggaggatgccggcatccacactgccc

SEQ ID NO: 13561 - RNA, 41 nt, synthetic construct
  source 1..41: mol_type = other RNA
aagaagcctaccccatagcggaggatgccggcatacacact

SEQ ID NO: 13562 - RNA, 40 nt, synthetic construct
  source 1..40: mol_type = other RNA
agcccaccccgtagagaaggatgccggatacacactgccc

SEQ ID NO: 13563 - RNA, 31 nt, synthetic construct
  source 1..31: mol_type = other RNA
acaggaagaagccctctccgtagagaaggat

SEQ ID NO: 13564 - RNA, 30 nt, synthetic construct
  source 1..30: mol_type = other RNA
ggatgatcagcaaggagcttatccgtagct

SEQ ID NO: 13565 - RNA, 33 nt, synthetic construct
  source 1..33: mol_type = other RNA
ccaccccgtagcggagaaaatgccggcatacac

SEQ ID NO: 13566 - RNA, 41 nt, synthetic construct
  source 1..41: mol_type = other RNA
aggatgaacaggaaggagcccaactcatggcggaggatgcc

SEQ ID NO: 13567 - RNA, 41 nt, synthetic construct
  source 1..41: mol_type = other RNA
aggatgaagaggaagaagtcccctccatagcggaggatgcc

SEQ ID NO: 13568 - RNA, 31 nt, synthetic construct
  source 1..31: mol_type = other RNA
ggaagaagcacaccccacagtggaggatgcc

SEQ ID NO: 13569 - RNA, 30 nt, synthetic construct
  source 1..30: mol_type = other RNA
ccaccccgtagcgggagatgccgcctacac

SEQ ID NO: 13570 - RNA, 32 nt, synthetic construct
  source 1..32: mol_type = other RNA
acaggaagaagacacaccccgtagaggaggat

SEQ ID NO: 13571 - RNA, 31 nt, synthetic construct
  source 1..31: mol_type = other RNA
ccaccccgtaggggaggatgccggcatacac

SEQ ID NO: 13572 - RNA, 31 nt, synthetic construct
  source 1..31: mol_type = other RNA
acagggggaagcccaccccgtaggggaggat

SEQ ID NO: 13573 - RNA, 41 nt, synthetic construct
  source 1..41: mol_type = other RNA
aagaagcccaccccatagcggaggatgccggaatacacact

SEQ ID NO: 13574 - RNA, 41 nt, synthetic construct
  source 1..41: mol_type = other RNA
aagaagcccaccgcgtagcggggtatgccggtatacacact

SEQ ID NO: 13575 - RNA, 41 nt, synthetic construct
  source 1..41: mol_type = other RNA
aagaagcccactccgtagcgaaggatgccggaatacacact

SEQ ID NO: 13576 - RNA, 41 nt, synthetic construct
  source 1..41: mol_type = other RNA
aagaagcccacaccgtagcgggggatgccggcatacacact

SEQ ID NO: 13577 - RNA, 31 nt, synthetic construct
  source 1..31: mol_type = other RNA
ccaccccgtagagaaggatgccggcatacac

SEQ ID NO: 13578 - RNA, 31 nt, synthetic construct
  source 1..31: mol_type = other RNA
ccaccccgtagtggaggatgacggcatacac

SEQ ID NO: 13579 - RNA, 31 nt, synthetic construct
  source 1..31: mol_type = other RNA
acaggaagaagccaatcccgtagcgcaggat

SEQ ID NO: 13580 - RNA, 41 nt, synthetic construct
  source 1..41: mol_type = other RNA
aacaggaagaagtcccctccatagcggactgtgcctgcata

SEQ ID NO: 13581 - RNA, 31 nt, synthetic construct
  source 1..31: mol_type = other RNA
acaggaagaagcacaccccacagtggaggat

SEQ ID NO: 13582 - RNA, 31 nt, synthetic construct
  source 1..31: mol_type = other RNA
ccaccccgtagtggagactgccggcgtacac

SEQ ID NO: 13583 - RNA, 31 nt, synthetic construct
  source 1..31: mol_type = other RNA
acaggaagaggcacaccccgtagtggaggat

SEQ ID NO: 13584 - RNA, 31 nt, synthetic construct
  source 1..31: mol_type = other RNA
ggaagaagcccgccccgtacaggaggatgcc

SEQ ID NO: 13585 - RNA, 42 nt, synthetic construct
  source 1..42: mol_type = other RNA
ccaccccgtaatcccaacaagtggagggtcgccggcctacac

SEQ ID NO: 13586 - RNA, 41 nt, synthetic construct
  source 1..41: mol_type = other RNA
aggatgaaaaggactaaacccaccccatagcgaaggatgcc

SEQ ID NO: 13587 - RNA, 41 nt, synthetic construct
  source 1..41: mol_type = other RNA
aacaggaataaacccaccccatagcgaaggatgcctgcata

SEQ ID NO: 13588 - RNA, 31 nt, synthetic construct
  source 1..31: mol_type = other RNA
ggaagaagtccaccccgttgcggaggatgcc

SEQ ID NO: 13589 - RNA, 41 nt, synthetic construct
  source 1..41: mol_type = other RNA
aacaggaagaagtcccccgcatagcggagcatgcctgcata

SEQ ID NO: 13590 - RNA, 31 nt, synthetic construct
  source 1..31: mol_type = other RNA
acaggtagaagtccactccgtagcgaaggat

SEQ ID NO: 13591 - RNA, 31 nt, synthetic construct
  source 1..31: mol_type = other RNA
ggaagaggcccagcccatagcggaggatgcc

SEQ ID NO: 13592 - RNA, 31 nt, synthetic construct
  source 1..31: mol_type = other RNA
acaggaagaggcccagcccatagcggaggat

SEQ ID NO: 13593 - RNA, 41 nt, synthetic construct
  source 1..41: mol_type = other RNA
aagaagcccagcccgtagcggaggctgccggcatacacact

SEQ ID NO: 13594 - RNA, 31 nt, synthetic construct
  source 1..31: mol_type = other RNA
acagggggaggcccagcccgtagcggaggat

SEQ ID NO: 13595 - RNA, 31 nt, synthetic construct
  source 1..31: mol_type = other RNA
acaggaagaagcctaccccatagcggaggat

SEQ ID NO: 13596 - RNA, 37 nt, synthetic construct
  source 1..37: mol_type = other RNA
ccaccccgtagcgcgagaagcgaggccgcgcatacac

SEQ ID NO: 13597 - RNA, 46 nt, synthetic construct
  source 1..46: mol_type = other RNA
aagaagccaatcccgtagcgcaagaagggatgccggcttacacact

SEQ ID NO: 13598 - RNA, 33 nt, synthetic construct
  source 1..33: mol_type = other RNA
agaagccaaccccgtagcggagaaaatgcctgc

SEQ ID NO: 13599 - RNA, 31 nt, synthetic construct
  source 1..31: mol_type = other RNA
acaggaaggagcccaactcatggcggaggat

SEQ ID NO: 13600 - RNA, 41 nt, synthetic construct
  source 1..41: mol_type = other RNA
agcccaccccatagcggactgtgccggcagacacactgccc

SEQ ID NO: 13601 - RNA, 31 nt, synthetic construct
  source 1..31: mol_type = other RNA
acaggattacgcccaccccgtagcgaaggat

SEQ ID NO: 13602 - RNA, 41 nt, synthetic construct
  source 1..41: mol_type = other RNA
agcccaccccgcagtgggggatgctggcaaacacactgccc

SEQ ID NO: 13603 - RNA, 31 nt, synthetic construct
  source 1..31: mol_type = other RNA
ggaagaagcccaccccgtcgtggacgatgcc

SEQ ID NO: 13604 - RNA, 31 nt, synthetic construct
  source 1..31: mol_type = other RNA
agaagcccaccccgtcgtggacgatgcctgc

SEQ ID NO: 13605 - RNA, 41 nt, synthetic construct
  source 1..41: mol_type = other RNA
aagaagcccaccccatagaggaggatgccgtcatacacact

SEQ ID NO: 13606 - RNA, 31 nt, synthetic construct
  source 1..31: mol_type = other RNA
acaggaagcagcccaccccgtagcggaggat

SEQ ID NO: 13607 - RNA, 31 nt, synthetic construct
  source 1..31: mol_type = other RNA
ggaagatgcccaccccgtagcggaggatgcc

SEQ ID NO: 13608 - RNA, 31 nt, synthetic construct
  source 1..31: mol_type = other RNA
acaggaagaagaccaccccgtagcgcaggat

SEQ ID NO: 13609 - RNA, 31 nt, synthetic construct
  source 1..31: mol_type = other RNA
ggaagaagcccaccccgaagcggaggatgcc

SEQ ID NO: 13610 - RNA, 45 nt, synthetic construct
  source 1..45: mol_type = other RNA
agcccaccccgtagcggacagggacgccggctatacacactgccc

SEQ ID NO: 13611 - RNA, 41 nt, synthetic construct
  source 1..41: mol_type = other RNA
aacaggaagtagaccacaccgtagcggaggaatcctgcata

SEQ ID NO: 13612 - RNA, 41 nt, synthetic construct
  source 1..41: mol_type = other RNA
aagaagccaaccccgtaacgggtgatgctgggatacacact

SEQ ID NO: 13613 - RNA, 31 nt, synthetic construct
  source 1..31: mol_type = other RNA
ccacctcgtagagggatgcggatgcatacac

SEQ ID NO: 13614 - RNA, 31 nt, synthetic construct
  source 1..31: mol_type = other RNA
agaagacctccccgtagtggaggatgcctgc

SEQ ID NO: 13615 - RNA, 31 nt, synthetic construct
  source 1..31: mol_type = other RNA
ccaccccgtagcggaagatgccggcatacac

SEQ ID NO: 13616 - RNA, 31 nt, synthetic construct
  source 1..31: mol_type = other RNA
ggaagaagcccaccccgtagtggaggatgcc

SEQ ID NO: 13617 - RNA, 41 nt, synthetic construct
  source 1..41: mol_type = other RNA
aacaggaaggagcccaccccataagggaggatgcctgcata

SEQ ID NO: 13618 - RNA, 39 nt, synthetic construct
  source 1..39: mol_type = other RNA
aagaagccgaccccgcagtgggatgccggcgtacacact

SEQ ID NO: 13619 - RNA, 48 nt, synthetic construct
  source 1..48: mol_type = other RNA
ggatgattcttcattacaacctgggaacgagctgtcacacccgtagct

SEQ ID NO: 13620 - RNA, 31 nt, synthetic construct
  source 1..31: mol_type = other RNA
ggaagcaacccaccccgtagcgaaggatgcc

SEQ ID NO: 13621 - RNA, 31 nt, synthetic construct
  source 1..31: mol_type = other RNA
acaggaagaagcccatcccgtcgcgcaggat

SEQ ID NO: 13622 - RNA, 31 nt, synthetic construct
  source 1..31: mol_type = other RNA
ccaccccgtagagaaggatgccggcgtacac

SEQ ID NO: 13623 - RNA, 31 nt, synthetic construct
  source 1..31: mol_type = other RNA
ggaagaagcccgccccatagcggaggatgcc

SEQ ID NO: 13624 - RNA, 31 nt, synthetic construct
  source 1..31: mol_type = other RNA
ccacctcagtgcggacaatgccggcctacac

SEQ ID NO: 13625 - RNA, 41 nt, synthetic construct
  source 1..41: mol_type = other RNA
aggatgaacaggaagcagcccacttcagtgcggaggatgcc

SEQ ID NO: 13626 - RNA, 41 nt, synthetic construct
  source 1..41: mol_type = other RNA
aagaagcccaccccatagtggaggatgccggcatacacact

SEQ ID NO: 13627 - RNA, 32 nt, synthetic construct
  source 1..32: mol_type = other RNA
acaggaagaagcccaccccgtagcgggaggat

SEQ ID NO: 13628 - RNA, 31 nt, synthetic construct
  source 1..31: mol_type = other RNA
ggaagaagcccaccccgtagtggtcgatgcc

SEQ ID NO: 13629 - RNA, 31 nt, synthetic construct
  source 1..31: mol_type = other RNA
ggaagaagcctaccccgttgtggaggatgcc

SEQ ID NO: 13630 - RNA, 31 nt, synthetic construct
  source 1..31: mol_type = other RNA
acaggaagaaccccaccccgtagtggaggat

SEQ ID NO: 13631 - RNA, 31 nt, synthetic construct
  source 1..31: mol_type = other RNA
acaggactaaacccaccccatagcgaaggat

SEQ ID NO: 13632 - RNA, 47 nt, synthetic construct
  source 1..47: mol_type = other RNA
agcccaccccgtagcggagtgatgccgcaaaccagtacacactgccc

SEQ ID NO: 13633 - RNA, 41 nt, synthetic construct
  source 1..41: mol_type = other RNA
aagaagcccaccccgtagcggaggatgctggcatacacact

SEQ ID NO: 13634 - RNA, 31 nt, synthetic construct
  source 1..31: mol_type = other RNA
ggaagaagccacccccgtagcgggggatgcc

SEQ ID NO: 13635 - RNA, 31 nt, synthetic construct
  source 1..31: mol_type = other RNA
acaggaagcaacccaccccgtagcgaaggat

SEQ ID NO: 13636 - RNA, 43 nt, synthetic construct
  source 1..43: mol_type = other RNA
aacaggaagaagtccaccccatagcgaaggatcagcctgcata

SEQ ID NO: 13637 - RNA, 40 nt, synthetic construct
  source 1..40: mol_type = other RNA
aacaggaagaagtcaacctcgtagcgaggatccctgcata

SEQ ID NO: 13638 - RNA, 41 nt, synthetic construct
  source 1..41: mol_type = other RNA
aagaagcccaccccgtagagaaggatgccggcatacacact

SEQ ID NO: 13639 - RNA, 27 nt, synthetic construct
  source 1..27: mol_type = other RNA
ccaccccgtagcggggccgccatacac

SEQ ID NO: 13640 - RNA, 37 nt, synthetic construct
  source 1..37: mol_type = other RNA
agcccaccccgtagcgggagatgccgccacactgccc

SEQ ID NO: 13641 - RNA, 41 nt, synthetic construct
  source 1..41: mol_type = other RNA
aagaagcccaccccgtagcggaggatgccggcatacacact

SEQ ID NO: 13642 - RNA, 31 nt, synthetic construct
  source 1..31: mol_type = other RNA
ccaccccgtagaggaagatgttggcatacac

SEQ ID NO: 13643 - RNA, 39 nt, synthetic construct
  source 1..39: mol_type = other RNA
agcccaccccgtagaggaggatgcccatccacactgccc

SEQ ID NO: 13644 - RNA, 31 nt, synthetic construct
  source 1..31: mol_type = other RNA
ggaagaagcacgccccatagcggagaatgcc

SEQ ID NO: 13645 - RNA, 42 nt, synthetic construct
  source 1..42: mol_type = other RNA
aacaggaagaggctcgacccatagcggagtgatgcctgcata

SEQ ID NO: 13646 - RNA, 37 nt, synthetic construct
  source 1..37: mol_type = other RNA
aggatgaacaggaacaagcccacaccgtaaggatgcc

SEQ ID NO: 13647 - RNA, 41 nt, synthetic construct
  source 1..41: mol_type = other RNA
aagaagcccgccccgtacaggaggatgacggcatacacact

SEQ ID NO: 13648 - RNA, 41 nt, synthetic construct
  source 1..41: mol_type = other RNA
agcccaccccgtagcggaggatgccggcttacacactgccc

SEQ ID NO: 13649 - RNA, 32 nt, synthetic construct
  source 1..32: mol_type = other RNA
ggatgaacaaggaagcagcccaacccatagct

SEQ ID NO: 13650 - RNA, 40 nt, synthetic construct
  source 1..40: mol_type = other RNA
aagaagccaacctcgtagcgaggatcccgcaatacacact

SEQ ID NO: 13651 - RNA, 43 nt, synthetic construct
  source 1..43: mol_type = other RNA
agcccaccccgtcgggaccgatgttgttgcatccacactgccc

SEQ ID NO: 13652 - RNA, 31 nt, synthetic construct
  source 1..31: mol_type = other RNA
acaggaagacgtacaccccgtagcggaggat

SEQ ID NO: 13653 - RNA, 31 nt, synthetic construct
  source 1..31: mol_type = other RNA
ccaccccgtagaggtagacagcggcatacac

SEQ ID NO: 13654 - RNA, 32 nt, synthetic construct
  source 1..32: mol_type = other RNA
acaggaagaaagcccaccccgtagaggaggat

SEQ ID NO: 13655 - RNA, 31 nt, synthetic construct
  source 1..31: mol_type = other RNA
ccaccccgtaggggaggagaccggcatacac

SEQ ID NO: 13656 - RNA, 40 nt, synthetic construct
  source 1..40: mol_type = other RNA
accaccaggtgaacaggcagaagcccgccccctagctgag

SEQ ID NO: 13657 - RNA, 40 nt, synthetic construct
  source 1..40: mol_type = other RNA
agcccaccccgtagaggaagatgttggcatcacactgccc

SEQ ID NO: 13658 - RNA, 41 nt, synthetic construct
  source 1..41: mol_type = other RNA
aagaagcccaccccgtagaggaagatgttggcatacacact

SEQ ID NO: 13659 - RNA, 31 nt, synthetic construct
  source 1..31: mol_type = other RNA
ggaagaagcccaccccatagcggaggatgcc

SEQ ID NO: 13660 - RNA, 41 nt, synthetic construct
  source 1..41: mol_type = other RNA
aggatgaaaaggaagaggctcgacccatagcggaggatgcc

SEQ ID NO: 13661 - RNA, 31 nt, synthetic construct
  source 1..31: mol_type = other RNA
acaggaagaagcctaccccgtagcggaggat

SEQ ID NO: 13662 - RNA, 31 nt, synthetic construct
  source 1..31: mol_type = other RNA
ccaccgcgtagcggggtatgccggtatacac

SEQ ID NO: 13663 - RNA, 31 nt, synthetic construct
  source 1..31: mol_type = other RNA
acaggtagaaacccactccgtagcgaaggat

SEQ ID NO: 13664 - RNA, 33 nt, synthetic construct
  source 1..33: mol_type = other RNA
ggatggccaggaagaaccatacccttcgtagct

SEQ ID NO: 13665 - RNA, 31 nt, synthetic construct
  source 1..31: mol_type = other RNA
ggaagatgtcaaccccgtaacgggtgatgcc

SEQ ID NO: 13666 - RNA, 31 nt, synthetic construct
  source 1..31: mol_type = other RNA
ccaccccgtagcgacagatgccggcatacac

SEQ ID NO: 13667 - RNA, 31 nt, synthetic construct
  source 1..31: mol_type = other RNA
ggaagaagcccaccccgtagcggaagatgcc

SEQ ID NO: 13668 - RNA, 42 nt, synthetic construct
  source 1..42: mol_type = other RNA
agcccaccccgtagcgaaggactgccgggataaacactgccc

SEQ ID NO: 13669 - RNA, 47 nt, synthetic construct
  source 1..47: mol_type = other RNA
agcccaccccgtagcgcgagaaggtatgccggctatacacactgccc

SEQ ID NO: 13670 - RNA, 36 nt, synthetic construct
  source 1..36: mol_type = other RNA
agaagccaatcccgtagcgcaagaagggatgcctgc

SEQ ID NO: 13671 - RNA, 31 nt, synthetic construct
  source 1..31: mol_type = other RNA
acagggagaagcccaccccgtcccggaggat

SEQ ID NO: 13672 - RNA, 35 nt, synthetic construct
  source 1..35: mol_type = other RNA
agaagaccaccccgtagcggagaaaaaatgcctgc

SEQ ID NO: 13673 - RNA, 41 nt, synthetic construct
  source 1..41: mol_type = other RNA
aagaagcccaccccgtagagaaggatgccggcgtacacact

SEQ ID NO: 13674 - RNA, 31 nt, synthetic construct
  source 1..31: mol_type = other RNA
ggaagaagcccaccccatagcggagaatgcc

SEQ ID NO: 13675 - RNA, 31 nt, synthetic construct
  source 1..31: mol_type = other RNA
agaagcccaccccatagcggagaatgcctgc

SEQ ID NO: 13676 - RNA, 41 nt, synthetic construct
  source 1..41: mol_type = other RNA
aagaagcccaccccgtagcgggggatgccggcatacacact

SEQ ID NO: 13677 - RNA, 31 nt, synthetic construct
  source 1..31: mol_type = other RNA
ggaagcagtccaccccgtagcggaggatgcc

SEQ ID NO: 13678 - RNA, 31 nt, synthetic construct
  source 1..31: mol_type = other RNA
ccaccccgcagtgggggatgctggcatacac

SEQ ID NO: 13679 - RNA, 41 nt, synthetic construct
  source 1..41: mol_type = other RNA
agcccaccccgttgtggaggatgctggcgtacacactgccc

SEQ ID NO: 13680 - RNA, 31 nt, synthetic construct
  source 1..31: mol_type = other RNA
ccaccccgttgtggaggatgctggcgtacac

SEQ ID NO: 13681 - RNA, 41 nt, synthetic construct
  source 1..41: mol_type = other RNA
aagaagcccaccccatagcggaggatgttggcatacacact

SEQ ID NO: 13682 - RNA, 31 nt, synthetic construct
  source 1..31: mol_type = other RNA
acaggaggaagcacgccccatagcggaggat

SEQ ID NO: 13683 - RNA, 29 nt, synthetic construct
  source 1..29: mol_type = other RNA
ccaccccgtaggagaatgccggcatacac

SEQ ID NO: 13684 - RNA, 31 nt, synthetic construct
  source 1..31: mol_type = other RNA
ccaccccgtagcgggggatgccggtatacac

SEQ ID NO: 13685 - RNA, 46 nt, synthetic construct
  source 1..46: mol_type = other RNA
accaccaggagaactgaacaaggaagcagcccaacccatagctgag

SEQ ID NO: 13686 - RNA, 31 nt, synthetic construct
  source 1..31: mol_type = other RNA
ccaccccgaagtggcagaatacggcatacac

SEQ ID NO: 13687 - RNA, 41 nt, synthetic construct
  source 1..41: mol_type = other RNA
aagaagccccccgcatagcggagcatgccggtatacacact

SEQ ID NO: 13688 - RNA, 31 nt, synthetic construct
  source 1..31: mol_type = other RNA
ggatgaacaggcagaagtcccccgcatagct

SEQ ID NO: 13689 - RNA, 31 nt, synthetic construct
  source 1..31: mol_type = other RNA
acaggaagaaaccctccccgtagcggaggat

SEQ ID NO: 13690 - RNA, 30 nt, synthetic construct
  source 1..30: mol_type = other RNA
ccacctcgtagcgaggatcccgcaatacac

SEQ ID NO: 13691 - RNA, 31 nt, synthetic construct
  source 1..31: mol_type = other RNA
ggaagaaggccacaccgtagcgggggatgcc

SEQ ID NO: 13692 - RNA, 31 nt, synthetic construct
  source 1..31: mol_type = other RNA
acaggatgaaggccacaccgtagcggaggat

SEQ ID NO: 13693 - RNA, 31 nt, synthetic construct
  source 1..31: mol_type = other RNA
ggatgaagaggggtccgccttcttcgtagct

SEQ ID NO: 13694 - RNA, 40 nt, synthetic construct
  source 1..40: mol_type = other RNA
aagaagccctctccgtagagaaggatgccggatacacact

SEQ ID NO: 13695 - RNA, 41 nt, synthetic construct
  source 1..41: mol_type = other RNA
aagaagcccagcccgtagcggcggctgccggcctacacact

SEQ ID NO: 13696 - RNA, 31 nt, synthetic construct
  source 1..31: mol_type = other RNA
acaggaagaggcccagcccgtagcggaggat

SEQ ID NO: 13697 - RNA, 31 nt, synthetic construct
  source 1..31: mol_type = other RNA
ccaccccgtagcggaaaagaaaggcatacac

SEQ ID NO: 13698 - RNA, 30 nt, synthetic construct
  source 1..30: mol_type = other RNA
ggatgagcgggaaaaagtcaccccatagct

SEQ ID NO: 13699 - RNA, 31 nt, synthetic construct
  source 1..31: mol_type = other RNA
acaggaagaaggccatcccgtagcgcaggat

SEQ ID NO: 13700 - RNA, 36 nt, synthetic construct
  source 1..36: mol_type = other RNA
ccaccccgtagcgcaagaagggatgccggcttacac

SEQ ID NO: 13701 - RNA, 31 nt, synthetic construct
  source 1..31: mol_type = other RNA
ccaccccgtagcggaagatgccgcaatacac

SEQ ID NO: 13702 - RNA, 41 nt, synthetic construct
  source 1..41: mol_type = other RNA
aagaagcccaccccgtagcgtaggatgccggcatacacact

SEQ ID NO: 13703 - RNA, 41 nt, synthetic construct
  source 1..41: mol_type = other RNA
aagaagcccaccccacagtggaggatgccgggatacacact

SEQ ID NO: 13704 - RNA, 40 nt, synthetic construct
  source 1..40: mol_type = other RNA
aagaagcccaccccgtagcgggagatgccgcctacacact

SEQ ID NO: 13705 - RNA, 31 nt, synthetic construct
  source 1..31: mol_type = other RNA
ggaagaagcccaccacgtagcggaggatgcc

SEQ ID NO: 13706 - RNA, 41 nt, synthetic construct
  source 1..41: mol_type = other RNA
aagaagcccaccccgtagcgcaggatgttggcatacacact

SEQ ID NO: 13707 - RNA, 37 nt, synthetic construct
  source 1..37: mol_type = other RNA
ccaccccgtagcggagtgatgccgcaaaccagtacac

SEQ ID NO: 13708 - RNA, 30 nt, synthetic construct
  source 1..30: mol_type = other RNA
ggaagaagtcaacctcgtagcgaggatgcc

SEQ ID NO: 13709 - RNA, 31 nt, synthetic construct
  source 1..31: mol_type = other RNA
ccaccccgtagcgaaggatgccggaatacac

SEQ ID NO: 13710 - RNA, 36 nt, synthetic construct
  source 1..36: mol_type = other RNA
ggaagaagtccatcccgtagcgcgagaaggtatgcc

SEQ ID NO: 13711 - RNA, 31 nt, synthetic construct
  source 1..31: mol_type = other RNA
ggaagaagcccaccccgtcccggaggatgcc

SEQ ID NO: 13712 - RNA, 41 nt, synthetic construct
  source 1..41: mol_type = other RNA
agcccaccccgtagcggaggatgctggcatactcactgccc

SEQ ID NO: 13713 - RNA, 31 nt, synthetic construct
  source 1..31: mol_type = other RNA
ccaccccgaagcggaggatgccggcgtacac

SEQ ID NO: 13714 - RNA, 41 nt, synthetic construct
  source 1..41: mol_type = other RNA
aagaagcccaccccgtagcgaagggtgcaggcatacacact

SEQ ID NO: 13715 - RNA, 31 nt, synthetic construct
  source 1..31: mol_type = other RNA
acaggaagcagaccaccccgtagcgaaggat

SEQ ID NO: 13716 - RNA, 31 nt, synthetic construct
  source 1..31: mol_type = other RNA
ccaccccgtagcggaggaatccggcatacac

SEQ ID NO: 13717 - RNA, 31 nt, synthetic construct
  source 1..31: mol_type = other RNA
acaggaacaagtccacaccgtagcggaggat

SEQ ID NO: 13718 - RNA, 31 nt, synthetic construct
  source 1..31: mol_type = other RNA
acaggcagaagtccaccccgttgcggaggat

SEQ ID NO: 13719 - RNA, 31 nt, synthetic construct
  source 1..31: mol_type = other RNA
ggaagaaaccctccccgtagcggaggatgcc

SEQ ID NO: 13720 - RNA, 42 nt, synthetic construct
  source 1..42: mol_type = other RNA
aagaagcccactccgtagcgaaggactgccgggatacacact

SEQ ID NO: 13721 - RNA, 41 nt, synthetic construct
  source 1..41: mol_type = other RNA
aagaagcccaccccgtagtggaggatgacggcatacacact

SEQ ID NO: 13722 - RNA, 62 nt, synthetic construct
  source 1..62: mol_type = other RNA
agcccaccccgtagcacgagaagggatgcccacaattctgcagctggcaatacacactgccc

SEQ ID NO: 13723 - RNA, 36 nt, synthetic construct
  source 1..36: mol_type = other RNA
ccaccccgtagcggagaaaaaatgtcgtgtgtacac

SEQ ID NO: 13724 - RNA, 50 nt, synthetic construct
  source 1..50: mol_type = other RNA
aacaggaaggagcccaactcatggcggacatctagacaagagcctgcata

SEQ ID NO: 13725 - RNA, 31 nt, synthetic construct
  source 1..31: mol_type = other RNA
acaggcataagcccaccccgtagcgaaggat

SEQ ID NO: 13726 - RNA, 31 nt, synthetic construct
  source 1..31: mol_type = other RNA
acaggattaagcccaccccgtagcggaggat

SEQ ID NO: 13727 - RNA, 31 nt, synthetic construct
  source 1..31: mol_type = other RNA
ggaagacgcccaccccgtagcgtaggatgcc

SEQ ID NO: 13728 - RNA, 31 nt, synthetic construct
  source 1..31: mol_type = other RNA
acaggaggacgcccaccccgtagcgaaggat

SEQ ID NO: 13729 - RNA, 41 nt, synthetic construct
  source 1..41: mol_type = other RNA
agcccaccccataacggaggaagccgtcctacacactgccc

SEQ ID NO: 13730 - RNA, 31 nt, synthetic construct
  source 1..31: mol_type = other RNA
ggaagaaaattaccccataacggaggatgcc

SEQ ID NO: 13731 - RNA, 41 nt, synthetic construct
  source 1..41: mol_type = other RNA
aagaagcccgccccatagcggaggaagccggcatacacact

SEQ ID NO: 13732 - RNA, 38 nt, synthetic construct
  source 1..38: mol_type = other RNA
accaccagaatgaacaggcagaagctccactagctgag

SEQ ID NO: 13733 - RNA, 41 nt, synthetic construct
  source 1..41: mol_type = other RNA
agcccaccccgtcgtggacgatgccggcagacacactgccc

SEQ ID NO: 13734 - RNA, 41 nt, synthetic construct
  source 1..41: mol_type = other RNA
aagaagcccaccccatagaggcgggtgccgtcatacacact

SEQ ID NO: 13735 - RNA, 29 nt, synthetic construct
  source 1..29: mol_type = other RNA
ccaccccgtagcggattatgccggtacac

SEQ ID NO: 13736 - RNA, 31 nt, synthetic construct
  source 1..31: mol_type = other RNA
acaggagtaagcccaccccgtagcggaggat

SEQ ID NO: 13737 - RNA, 41 nt, synthetic construct
  source 1..41: mol_type = other RNA
agcccaccccgaagcggaggatgccggcgtgcacactgccc

SEQ ID NO: 13738 - RNA, 41 nt, synthetic construct
  source 1..41: mol_type = other RNA
aagaagcccacaccgtagcggaggaatccggcatacacact

SEQ ID NO: 13739 - RNA, 31 nt, synthetic construct
  source 1..31: mol_type = other RNA
ccaccccgtagcggaggaaaccggcatacac

SEQ ID NO: 13740 - RNA, 31 nt, synthetic construct
  source 1..31: mol_type = other RNA
agaagtccactccgtagcgaaggatgcctgc

SEQ ID NO: 13741 - RNA, 37 nt, synthetic construct
  source 1..37: mol_type = other RNA
ggaagaaccatacccttcgtagcggacaacggatgcc

SEQ ID NO: 13742 - RNA, 37 nt, synthetic construct
  source 1..37: mol_type = other RNA
agaagcatacccttcgtagcggacaacggatccctgc

SEQ ID NO: 13743 - RNA, 31 nt, synthetic construct
  source 1..31: mol_type = other RNA
ggaagaagcccacctcgtagcggaggatgcc

SEQ ID NO: 13744 - RNA, 31 nt, synthetic construct
  source 1..31: mol_type = other RNA
ccaccccgtagcggtggatgtcggcatacac

SEQ ID NO: 13745 - RNA, 31 nt, synthetic construct
  source 1..31: mol_type = other RNA
ccaccccgtagcggcggctgccggcctacac

SEQ ID NO: 13746 - RNA, 44 nt, synthetic construct
  source 1..44: mol_type = other RNA
ccaccccgtgcttaaattcctaggcggatgatgtcggcctacac

SEQ ID NO: 13747 - RNA, 31 nt, synthetic construct
  source 1..31: mol_type = other RNA
ggatgaacgggaagaagcttcacccgtagct

SEQ ID NO: 13748 - RNA, 47 nt, synthetic construct
  source 1..47: mol_type = other RNA
aagaagcccatcccgtagcgcgagaagcgaggccgcgcatacacact

SEQ ID NO: 13749 - RNA, 31 nt, synthetic construct
  source 1..31: mol_type = other RNA
acaggaagaagaccatcccgtagcgcaggat

SEQ ID NO: 13750 - RNA, 36 nt, synthetic construct
  source 1..36: mol_type = other RNA
ggaagaaggccatcccgtagcgcgagaagggatgcc

SEQ ID NO: 13751 - RNA, 52 nt, synthetic construct
  source 1..52: mol_type = other RNA
ccaccccgtagcacgagaagggatgcccacaattctgcagctggcaatacac

SEQ ID NO: 13752 - RNA, 36 nt, synthetic construct
  source 1..36: mol_type = other RNA
ggaagaagcccatcccgtcgcgcgagaaggaatgcc

SEQ ID NO: 13753 - RNA, 36 nt, synthetic construct
  source 1..36: mol_type = other RNA
ggaagaagccaatcccgtagcgcaagaagggatgcc

SEQ ID NO: 13754 - RNA, 31 nt, synthetic construct
  source 1..31: mol_type = other RNA
acaggaagaagtcccctccatagcggaggat

SEQ ID NO: 13755 - RNA, 38 nt, synthetic construct
  source 1..38: mol_type = other RNA
aggatgaacaggaagcccaacccatagtggaggatgcc

SEQ ID NO: 13756 - RNA, 41 nt, synthetic construct
  source 1..41: mol_type = other RNA
aagaagcccaccccgtagcgaaggatgccggcatacacact

SEQ ID NO: 13757 - RNA, 41 nt, synthetic construct
  source 1..41: mol_type = other RNA
agcccaccccatagcggaagatgaaggcatacccactgccc

SEQ ID NO: 13758 - RNA, 41 nt, synthetic construct
  source 1..41: mol_type = other RNA
aacaggaagcagcccacttcagtgcggacaatgcctgcata

SEQ ID NO: 13759 - RNA, 26 nt, synthetic construct
  source 1..26: mol_type = other RNA
ccaccccgtagcggaggatgatacac

SEQ ID NO: 13760 - RNA, 41 nt, synthetic construct
  source 1..41: mol_type = other RNA
aagaagccccactagcgaacatgatcccggctatacacact

SEQ ID NO: 13761 - RNA, 28 nt, synthetic construct
  source 1..28: mol_type = other RNA
ggatgaacaggcagaagctccactagct

SEQ ID NO: 13762 - RNA, 41 nt, synthetic construct
  source 1..41: mol_type = other RNA
aacaggaaaaagcacaccccaaggtgacagatgcctgcata

SEQ ID NO: 13763 - RNA, 31 nt, synthetic construct
  source 1..31: mol_type = other RNA
ggaagaagcccgccccgtaggggaggatgcc

SEQ ID NO: 13764 - RNA, 41 nt, synthetic construct
  source 1..41: mol_type = other RNA
aacaggaagaagcccgccccctaggggaggaggcctgcata

SEQ ID NO: 13765 - RNA, 41 nt, synthetic construct
  source 1..41: mol_type = other RNA
aagaagcccaccccgtagtggtcgatggtggcgtacacact

SEQ ID NO: 13766 - RNA, 41 nt, synthetic construct
  source 1..41: mol_type = other RNA
aagaagcccaccccgcagtgggggatgctggcatacacact

SEQ ID NO: 13767 - RNA, 29 nt, synthetic construct
  source 1..29: mol_type = other RNA
ggaagaagtcgaccccgcagtgggatgcc

SEQ ID NO: 13768 - RNA, 41 nt, synthetic construct
  source 1..41: mol_type = other RNA
agcccaccccatagcggaggatgttggcagacccactgccc

SEQ ID NO: 13769 - RNA, 39 nt, synthetic construct
  source 1..39: mol_type = other RNA
aagaagcccaccccgtagcggattatgccggtacacact

SEQ ID NO: 13770 - RNA, 32 nt, synthetic construct
  source 1..32: mol_type = other RNA
ccaccccatagcggagtgatgccggcatacac

SEQ ID NO: 13771 - RNA, 31 nt, synthetic construct
  source 1..31: mol_type = other RNA
acaggaagagtctcaacccgtagtggaggat

SEQ ID NO: 13772 - RNA, 41 nt, synthetic construct
  source 1..41: mol_type = other RNA
aagaagcccaccccgtaggggaggatgccggcatacacact

SEQ ID NO: 13773 - RNA, 31 nt, synthetic construct
  source 1..31: mol_type = other RNA
ccaccccgtagcggaggatgacggcatacac

SEQ ID NO: 13774 - RNA, 31 nt, synthetic construct
  source 1..31: mol_type = other RNA
ggaagaagaccaccccgtagcgcaggatgcc

SEQ ID NO: 13775 - RNA, 29 nt, synthetic construct
  source 1..29: mol_type = other RNA
acaggcaggagaccacaccgtaggaggat

SEQ ID NO: 13776 - RNA, 31 nt, synthetic construct
  source 1..31: mol_type = other RNA
ccaccccatagcggaggatgccggaatacac

SEQ ID NO: 13777 - RNA, 41 nt, synthetic construct
  source 1..41: mol_type = other RNA
aagaagcccaccccatagcgaaggatgccggcatacacact

SEQ ID NO: 13778 - RNA, 31 nt, synthetic construct
  source 1..31: mol_type = other RNA
ccaccccatagcgaaggatgccggcatacac

SEQ ID NO: 13779 - RNA, 32 nt, synthetic construct
  source 1..32: mol_type = other RNA
agaagcctaccccgtagcggagtgatgcctgc

SEQ ID NO: 13780 - RNA, 41 nt, synthetic construct
  source 1..41: mol_type = other RNA
aagaagcccgacccgtagcgggggatgccggtatacacact

SEQ ID NO: 13781 - RNA, 35 nt, synthetic construct
  source 1..35: mol_type = other RNA
ccaccccgtagcggacagggacgccggctatacac

SEQ ID NO: 13782 - RNA, 31 nt, synthetic construct
  source 1..31: mol_type = other RNA
ggaagcagaccaccccgtagcgaaggatgcc

SEQ ID NO: 13783 - RNA, 31 nt, synthetic construct
  source 1..31: mol_type = other RNA
ggaagaagtccaccgcgtagcggggtatgcc

SEQ ID NO: 13784 - RNA, 31 nt, synthetic construct
  source 1..31: mol_type = other RNA
acaggcagaagtcccccgcatagcggaggat

SEQ ID NO: 13785 - RNA, 31 nt, synthetic construct
  source 1..31: mol_type = other RNA
ggaagaaacccactccgtagcgaaggatgcc

SEQ ID NO: 13786 - RNA, 32 nt, synthetic construct
  source 1..32: mol_type = other RNA
agaagcccactccgtagcgaaggactgcctgc

SEQ ID NO: 13787 - RNA, 43 nt, synthetic construct
  source 1..43: mol_type = other RNA
aggatgaacaggaagaaccatacccttcgtagcggaggatgcc

SEQ ID NO: 13788 - RNA, 39 nt, synthetic construct
  source 1..39: mol_type = other RNA
aacaggaatccgccttcttcgtagagggatgcctgcata

SEQ ID NO: 13789 - RNA, 29 nt, synthetic construct
  source 1..29: mol_type = other RNA
acaggggtccgccttcttcgtagaaggat

SEQ ID NO: 13790 - RNA, 31 nt, synthetic construct
  source 1..31: mol_type = other RNA
ccaccccgtagtggaggatgcagacgtacac

SEQ ID NO: 13791 - RNA, 31 nt, synthetic construct
  source 1..31: mol_type = other RNA
ccaccccgtaggggaggctgccggcatacac

SEQ ID NO: 13792 - RNA, 41 nt, synthetic construct
  source 1..41: mol_type = other RNA
aagaagcccaccccgtagcggaagatgccggcatacacact

SEQ ID NO: 13793 - RNA, 31 nt, synthetic construct
  source 1..31: mol_type = other RNA
ccaccccataagggaggatgttggcatacac

SEQ ID NO: 13794 - RNA, 31 nt, synthetic construct
  source 1..31: mol_type = other RNA
acaggaaggagcccaccccataagggaggat

SEQ ID NO: 13795 - RNA, 41 nt, synthetic construct
  source 1..41: mol_type = other RNA
aagaagcccaccccgtagcgacagatgccggcatacacact

SEQ ID NO: 13796 - RNA, 36 nt, synthetic construct
  source 1..36: mol_type = other RNA
ccaccccgtagcgcgagaaggtatgccggcttacac

SEQ ID NO: 13797 - RNA, 30 nt, synthetic construct
  source 1..30: mol_type = other RNA
ggaagaaccaaccccgtagcggagaatgcc

SEQ ID NO: 13798 - RNA, 31 nt, synthetic construct
  source 1..31: mol_type = other RNA
ggaagaagcccaccccgtagagaaggatgcc

SEQ ID NO: 13799 - RNA, 41 nt, synthetic construct
  source 1..41: mol_type = other RNA
aagaagccccctccatagcggactgtgccggcatacacact

SEQ ID NO: 13800 - RNA, 43 nt, synthetic construct
  source 1..43: mol_type = other RNA
agcccaccccgtagcggaagatgccgcaaatcccacactgccc

SEQ ID NO: 13801 - RNA, 28 nt, synthetic construct
  source 1..28: mol_type = other RNA
ggatgaacaggaagcccaacccatagct

SEQ ID NO: 13802 - RNA, 31 nt, synthetic construct
  source 1..31: mol_type = other RNA
ggaagaagcccactccatagcggaagatgcc

SEQ ID NO: 13803 - RNA, 37 nt, synthetic construct
  source 1..37: mol_type = other RNA
agcccaccccgtagcggggccgccatactcactgccc

SEQ ID NO: 13804 - RNA, 41 nt, synthetic construct
  source 1..41: mol_type = other RNA
aacaggaagaaaattaccccataacggaggaagcctgcata

SEQ ID NO: 13805 - RNA, 31 nt, synthetic construct
  source 1..31: mol_type = other RNA
ggaagaagcccaccccgtagaggtagatgcc

SEQ ID NO: 13806 - RNA, 31 nt, synthetic construct
  source 1..31: mol_type = other RNA
agaagcccaccccgtagaggtagacacctgc

SEQ ID NO: 13807 - RNA, 40 nt, synthetic construct
  source 1..40: mol_type = other RNA
aacaggaagaagctccactagcgaacatgatccctgcata

SEQ ID NO: 13808 - RNA, 31 nt, synthetic construct
  source 1..31: mol_type = other RNA
agaagcccaccccatagtggaggatgcctgc

SEQ ID NO: 13809 - RNA, 41 nt, synthetic construct
  source 1..41: mol_type = other RNA
agcccaccccaaggtgacagatgcaggcatacacactgccc

SEQ ID NO: 13810 - RNA, 31 nt, synthetic construct
  source 1..31: mol_type = other RNA
acaggcagaagcccgccccctaggggaggat

SEQ ID NO: 13811 - RNA, 31 nt, synthetic construct
  source 1..31: mol_type = other RNA
ccaccccacagtggaggatgccgggatacac

SEQ ID NO: 13812 - RNA, 40 nt, synthetic construct
  source 1..40: mol_type = other RNA
agcccaccccgtagtggtcgatggtggcggtacactgccc

SEQ ID NO: 13813 - RNA, 39 nt, synthetic construct
  source 1..39: mol_type = other RNA
aagaagcccaccccgtagaggaggatgcccatacacact

SEQ ID NO: 13814 - RNA, 29 nt, synthetic construct
  source 1..29: mol_type = other RNA
ccaccccgtagaggaggatgcccatacac

SEQ ID NO: 13815 - RNA, 31 nt, synthetic construct
  source 1..31: mol_type = other RNA
ggaagaagtccaccccgcagtgggggatgcc

SEQ ID NO: 13816 - RNA, 31 nt, synthetic construct
  source 1..31: mol_type = other RNA
acaggcagaagcctaccccgttgtggaggat

SEQ ID NO: 13817 - RNA, 29 nt, synthetic construct
  source 1..29: mol_type = other RNA
ccaccccgcagtgggatgccggcgtacac

SEQ ID NO: 13818 - RNA, 41 nt, synthetic construct
  source 1..41: mol_type = other RNA
aagaagcccaccccgtcgtggacgatgccggcatacacact

SEQ ID NO: 13819 - RNA, 31 nt, synthetic construct
  source 1..31: mol_type = other RNA
agaagcccaccccatagcggaggatgcctgc

SEQ ID NO: 13820 - RNA, 31 nt, synthetic construct
  source 1..31: mol_type = other RNA
agaagcacgccccatagcggagaatgcctgc

SEQ ID NO: 13821 - RNA, 41 nt, synthetic construct
  source 1..41: mol_type = other RNA
aagaagcccgccccatagcggagaatgccggcatacacact

SEQ ID NO: 13822 - RNA, 31 nt, synthetic construct
  source 1..31: mol_type = other RNA
ccaccccatagcggagaatgccggcatacac

SEQ ID NO: 13823 - RNA, 31 nt, synthetic construct
  source 1..31: mol_type = other RNA
agaagcccaccccgtagcggattatgcctgc

SEQ ID NO: 13824 - RNA, 32 nt, synthetic construct
  source 1..32: mol_type = other RNA
ccaccccgtagtggagtgatgacgacatacac

SEQ ID NO: 13825 - RNA, 31 nt, synthetic construct
  source 1..31: mol_type = other RNA
ggaagaagccaaccccatagcgggggatgcc

SEQ ID NO: 13826 - RNA, 41 nt, synthetic construct
  source 1..41: mol_type = other RNA
agcccaccccgtacaggaggatgacggcataaacactgccc

SEQ ID NO: 13827 - RNA, 39 nt, synthetic construct
  source 1..39: mol_type = other RNA
agcccaccccgtaggggaggatgccggcatacactgccc

SEQ ID NO: 13828 - RNA, 31 nt, synthetic construct
  source 1..31: mol_type = other RNA
ggaagcagcccaccccgtagcggaggatgcc

SEQ ID NO: 13829 - RNA, 31 nt, synthetic construct
  source 1..31: mol_type = other RNA
ccaccccgtagcgcaggatgttggcatacac

SEQ ID NO: 13830 - RNA, 44 nt, synthetic construct
  source 1..44: mol_type = other RNA
agcccaccccgtagcggaggatgccggcatacaccacactgccc

SEQ ID NO: 13831 - RNA, 31 nt, synthetic construct
  source 1..31: mol_type = other RNA
acaggaataagcccaccccatagcggaggat

SEQ ID NO: 13832 - RNA, 41 nt, synthetic construct
  source 1..41: mol_type = other RNA
aagaagcccaccccgtagcggcggatgccggtatacacact

SEQ ID NO: 13833 - RNA, 47 nt, synthetic construct
  source 1..47: mol_type = other RNA
aagaagcctaccccgtagcggagtgatgccgcaaaccagtacacact

SEQ ID NO: 13834 - RNA, 34 nt, synthetic construct
  source 1..34: mol_type = other RNA
ggaagaagcccaatccgtagcggacagggatgcc

SEQ ID NO: 13835 - RNA, 31 nt, synthetic construct
  source 1..31: mol_type = other RNA
ccaccccgtagcgaagggagccggcatacac

SEQ ID NO: 13836 - RNA, 41 nt, synthetic construct
  source 1..41: mol_type = other RNA
agcccaccccgaagtggcagaatacggcatacgcactgccc

SEQ ID NO: 13837 - RNA, 31 nt, synthetic construct
  source 1..31: mol_type = other RNA
acaggcagaagtccaccgcgtagcggaggat

SEQ ID NO: 13838 - RNA, 31 nt, synthetic construct
  source 1..31: mol_type = other RNA
ggaagaggtccaccgcgtagcggggtatgcc

SEQ ID NO: 13839 - RNA, 31 nt, synthetic construct
  source 1..31: mol_type = other RNA
agaagtcccccgcatagcggagcatgcctgc

SEQ ID NO: 13840 - RNA, 31 nt, synthetic construct
  source 1..31: mol_type = other RNA
acaggcggaagtccaccccatagcgaaggat

SEQ ID NO: 13841 - RNA, 32 nt, synthetic construct
  source 1..32: mol_type = other RNA
ccaccccgtagcgaaggactgccgggatacac

SEQ ID NO: 13842 - RNA, 41 nt, synthetic construct
  source 1..41: mol_type = other RNA
aagaagcccagcccatagcggaaggtgccggcatacacact

SEQ ID NO: 13843 - RNA, 31 nt, synthetic construct
  source 1..31: mol_type = other RNA
ccaccccgtaacgggtgatgctgggatacac

SEQ ID NO: 13844 - RNA, 41 nt, synthetic construct
  source 1..41: mol_type = other RNA
aagaagccctccccgtagtggaggatgcagacgtacacact

SEQ ID NO: 13845 - RNA, 36 nt, synthetic construct
  source 1..36: mol_type = other RNA
agaagtccatcccgtagcgcgagaaggtatgcctgc

SEQ ID NO: 13846 - RNA, 46 nt, synthetic construct
  source 1..46: mol_type = other RNA
aagaagcccatcccgtagcgcgagaaggtatgccggcttacacact

SEQ ID NO: 13847 - RNA, 31 nt, synthetic construct
  source 1..31: mol_type = other RNA
ggaagaaaaccaccccgtagcggagaatgcc

SEQ ID NO: 13848 - RNA, 50 nt, synthetic construct
  source 1..50: mol_type = other RNA
agcccacctcatggctgacatctagacaagagctggcgtgcacactgccc

SEQ ID NO: 13849 - RNA, 43 nt, synthetic construct
  source 1..43: mol_type = other RNA
acaggcagaagcccactccgtagcgaaaaaaaaaaaagaggat

SEQ ID NO: 13850 - RNA, 29 nt, synthetic construct
  source 1..29: mol_type = other RNA
ggaaggcccaacccatagtggaggatgcc

SEQ ID NO: 13851 - RNA, 30 nt, synthetic construct
  source 1..30: mol_type = other RNA
ggaagacgtacaccccgtagcggggatgcc

SEQ ID NO: 13852 - RNA, 41 nt, synthetic construct
  source 1..41: mol_type = other RNA
agcccacctcagtgcggacaatgccggcctgcacactgccc

SEQ ID NO: 13853 - RNA, 28 nt, synthetic construct
  source 1..28: mol_type = other RNA
ggaagaagctccactagcgaacaatgcc

SEQ ID NO: 13854 - RNA, 38 nt, synthetic construct
  source 1..38: mol_type = other RNA
aggatgaacaggcagaagctccactagcgaaggatgcc

SEQ ID NO: 13855 - RNA, 41 nt, synthetic construct
  source 1..41: mol_type = other RNA
aggatgaaacggaaaaagcacaccccaaggtgaaggatgcc

SEQ ID NO: 13856 - RNA, 41 nt, synthetic construct
  source 1..41: mol_type = other RNA
aagaagcccgccccgtaggggaggagaccggcatacacact

SEQ ID NO: 13857 - RNA, 31 nt, synthetic construct
  source 1..31: mol_type = other RNA
acaggctgaagcccgccccgtaggggaggat

SEQ ID NO: 13858 - RNA, 41 nt, synthetic construct
  source 1..41: mol_type = other RNA
aagaagcctaccccgttgtggaggatgctggcgtacacact

SEQ ID NO: 13859 - RNA, 31 nt, synthetic construct
  source 1..31: mol_type = other RNA
ggaagaaccccaccccgtagtggagaatgcc

SEQ ID NO: 13860 - RNA, 31 nt, synthetic construct
  source 1..31: mol_type = other RNA
ccaccccatagcggaggatgttggcatacac

SEQ ID NO: 13861 - RNA, 39 nt, synthetic construct
  source 1..39: mol_type = other RNA
agcccaccccgtagtggaaaatgccgaaacacactgccc

SEQ ID NO: 13862 - RNA, 31 nt, synthetic construct
  source 1..31: mol_type = other RNA
ggaagaggcacaccccgtagtggaaaatgcc

SEQ ID NO: 13863 - RNA, 40 nt, synthetic construct
  source 1..40: mol_type = other RNA
aagaagcccaccccgtagtggaaaatgccgaatacacact

SEQ ID NO: 13864 - RNA, 31 nt, synthetic construct
  source 1..31: mol_type = other RNA
ggaagaagcccaccccatagaggaggatgcc

SEQ ID NO: 13865 - RNA, 31 nt, synthetic construct
  source 1..31: mol_type = other RNA
acaggaagaaacccaccccatagaggaggat

SEQ ID NO: 13866 - RNA, 32 nt, synthetic construct
  source 1..32: mol_type = other RNA
ggaagaggctcgacccatagcggagtgatgcc

SEQ ID NO: 13867 - RNA, 31 nt, synthetic construct
  source 1..31: mol_type = other RNA
ggatgaaaaggaagaggctcgacccatagct

SEQ ID NO: 13868 - RNA, 27 nt, synthetic construct
  source 1..27: mol_type = other RNA
acaggaacaagcccacaccgtaaggat

SEQ ID NO: 13869 - RNA, 31 nt, synthetic construct
  source 1..31: mol_type = other RNA
ccaccccgtagcggaggatgccggcttacac

SEQ ID NO: 13870 - RNA, 41 nt, synthetic construct
  source 1..41: mol_type = other RNA
agcccacctcgtagaggcggatgttggcatactcactgccc

SEQ ID NO: 13871 - RNA, 31 nt, synthetic construct
  source 1..31: mol_type = other RNA
ggaagatgccagtctcgtagaggcggatgcc

SEQ ID NO: 13872 - RNA, 41 nt, synthetic construct
  source 1..41: mol_type = other RNA
aagaagccagtctcgtagaggcggatgttggcatacacact

SEQ ID NO: 13873 - RNA, 31 nt, synthetic construct
  source 1..31: mol_type = other RNA
acagggagatgccagtctcgtagaggaggat

SEQ ID NO: 13874 - RNA, 41 nt, synthetic construct
  source 1..41: mol_type = other RNA
aagaagcccaccccgaagcggaggatgccggcgtacacact

SEQ ID NO: 13875 - RNA, 45 nt, synthetic construct
  source 1..45: mol_type = other RNA
aagaagcccaatccgtagcggacagggacgccggctatacacact

SEQ ID NO: 13876 - RNA, 31 nt, synthetic construct
  source 1..31: mol_type = other RNA
agaagcccaccccgtagcgaagggtgcctgc

SEQ ID NO: 13877 - RNA, 31 nt, synthetic construct
  source 1..31: mol_type = other RNA
agaagaccaccccgtagcgaagggagcctgc

SEQ ID NO: 13878 - RNA, 31 nt, synthetic construct
  source 1..31: mol_type = other RNA
acaggaaaaggtccaccgcgtagcggaggat

SEQ ID NO: 13879 - RNA, 31 nt, synthetic construct
  source 1..31: mol_type = other RNA
ggaagaagtcccccgcatagcggagcatgcc

SEQ ID NO: 13880 - RNA, 41 nt, synthetic construct
  source 1..41: mol_type = other RNA
aggatgaacaggcagaagtcccccgcatagcggaggatgcc

SEQ ID NO: 13881 - RNA, 44 nt, synthetic construct
  source 1..44: mol_type = other RNA
agcccaccccatagcgaaggatcagccggcattactcactgccc

SEQ ID NO: 13882 - RNA, 40 nt, synthetic construct
  source 1..40: mol_type = other RNA
agcccaccccatagcggaaggtgccggcaccacactgccc

SEQ ID NO: 13883 - RNA, 31 nt, synthetic construct
  source 1..31: mol_type = other RNA
ccaccccatagcggaaggtgccggcatacac

SEQ ID NO: 13884 - RNA, 39 nt, synthetic construct
  source 1..39: mol_type = other RNA
aggatgaagaggggtccgccttcttcgtagaaggatgcc

SEQ ID NO: 13885 - RNA, 41 nt, synthetic construct
  source 1..41: mol_type = other RNA
agcccaccccgtaggggaggctgccggcatgatcactgccc

SEQ ID NO: 13886 - RNA, 54 nt, synthetic construct
  source 1..54: mol_type = other RNA
ggatgaacacaggaataaatgttcatttcaaatagacccctcttcatggtagct

SEQ ID NO: 13887 - RNA, 36 nt, synthetic construct
  source 1..36: mol_type = other RNA
agaagaccatcccgtagcgcgagaagcgaggcctgc

SEQ ID NO: 13888 - RNA, 47 nt, synthetic construct
  source 1..47: mol_type = other RNA
agcccaccccgtcgcgcgagaaggaatgccgcgcatagacactgccc

SEQ ID NO: 13889 - RNA, 31 nt, synthetic construct
  source 1..31: mol_type = other RNA
ccaccccgtcccggaggatgctgacttacac

SEQ ID NO: 13890 - RNA, 31 nt, synthetic construct
  source 1..31: mol_type = other RNA
acaggaaagaaccaaccccgtagcggaggat

SEQ ID NO: 13891 - RNA, 31 nt, synthetic construct
  source 1..31: mol_type = other RNA
ccaccccatagcggactgtgccggcatacac

SEQ ID NO: 13892 - RNA, 43 nt, synthetic construct
  source 1..43: mol_type = other RNA
agaagcccactccgtagcgaaaaaaaaaaaagaggatgcctgc

SEQ ID NO: 13893 - RNA, 43 nt, synthetic construct
  source 1..43: mol_type = other RNA
aagaagcccaccccatagcggagaatgccgctcaatacacact

SEQ ID NO: 13894 - RNA, 41 nt, synthetic construct
  source 1..41: mol_type = other RNA
aagaagcccactccatagcggaagatgaaggcatacacact

SEQ ID NO: 13895 - RNA, 31 nt, synthetic construct
  source 1..31: mol_type = other RNA
ggaagcagcccacttcagtgcggacaatgcc

SEQ ID NO: 13896 - RNA, 28 nt, synthetic construct
  source 1..28: mol_type = other RNA
acaggcagaagctccactagcgaaggat

SEQ ID NO: 13897 - RNA, 31 nt, synthetic construct
  source 1..31: mol_type = other RNA
acaggaaaaagcacaccccaaggtgaaggat

SEQ ID NO: 13898 - RNA, 31 nt, synthetic construct
  source 1..31: mol_type = other RNA
agaagcccaccccgtagcgggagatgcctgc

SEQ ID NO: 13899 - RNA, 31 nt, synthetic construct
  source 1..31: mol_type = other RNA
ccaccccgtagtggtcgatggtggcgtacac

SEQ ID NO: 13900 - RNA, 31 nt, synthetic construct
  source 1..31: mol_type = other RNA
agaagcctaccccgttgtggaggatgcctgc

SEQ ID NO: 13901 - RNA, 31 nt, synthetic construct
  source 1..31: mol_type = other RNA
agaagcacaccccgtagtggaaaatgcctgc

SEQ ID NO: 13902 - RNA, 32 nt, synthetic construct
  source 1..32: mol_type = other RNA
ggaagagtctcaacccgtagtggagtgatgcc

SEQ ID NO: 13903 - RNA, 42 nt, synthetic construct
  source 1..42: mol_type = other RNA
aagaagcccaacccgtagtggagtgatgacgacatacacact

SEQ ID NO: 13904 - RNA, 33 nt, synthetic construct
  source 1..33: mol_type = other RNA
agcccaccccgtatgccggcatacacactgccc

SEQ ID NO: 13905 - RNA, 33 nt, synthetic construct
  source 1..33: mol_type = other RNA
aacaggaacaagcccacaccgtatgcctgcata

SEQ ID NO: 13906 - RNA, 60 nt, synthetic construct
  source 1..60: mol_type = other RNA
agcccaccccgtaatcccaacaagttgagggtcgccggcctgtggatcactacactgccc

SEQ ID NO: 13907 - RNA, 56 nt, synthetic construct
  source 1..56: mol_type = other RNA
aggatgaacctgggaacgagctgtcacacccgtaatcccaacaagtggaggatgcc

SEQ ID NO: 13908 - RNA, 41 nt, synthetic construct
  source 1..41: mol_type = other RNA
aagaagcccaccacgtagcggaggatgacggcatacacact

SEQ ID NO: 13909 - RNA, 41 nt, synthetic construct
  source 1..41: mol_type = other RNA
aagaagcccaccccgtagcggaggatgccggcttacacact

SEQ ID NO: 13910 - RNA, 41 nt, synthetic construct
  source 1..41: mol_type = other RNA
aagaagcccataccgtagcggaggatgccggcatacacact

SEQ ID NO: 13911 - RNA, 41 nt, synthetic construct
  source 1..41: mol_type = other RNA
aagaagcccaacccatagtggaggatgccggtatacacact

SEQ ID NO: 13912 - RNA, 31 nt, synthetic construct
  source 1..31: mol_type = other RNA
acaggaagtagaccacaccgtagcggaggat

SEQ ID NO: 13913 - RNA, 31 nt, synthetic construct
  source 1..31: mol_type = other RNA
ggaagaagtccacaccgtagcggaggatgcc

SEQ ID NO: 13914 - RNA, 31 nt, synthetic construct
  source 1..31: mol_type = other RNA
ccaccgcatagcggagcatgccggtatacac

SEQ ID NO: 13915 - RNA, 31 nt, synthetic construct
  source 1..31: mol_type = other RNA
agaagccctccccgtagcggaggaaacctgc

SEQ ID NO: 13916 - RNA, 32 nt, synthetic construct
  source 1..32: mol_type = other RNA
ggaagcagcccagcccatagcggaaggatgcc

SEQ ID NO: 13917 - RNA, 41 nt, synthetic construct
  source 1..41: mol_type = other RNA
aagaagcccacctcgtagcggaggatgccgcgctacacact

SEQ ID NO: 13918 - RNA, 31 nt, synthetic construct
  source 1..31: mol_type = other RNA
ccacctcgtagcggaggatgccgcgctacac

SEQ ID NO: 13919 - RNA, 41 nt, synthetic construct
  source 1..41: mol_type = other RNA
aagaagcccagcccatagcggaggatgacggcatacacact

SEQ ID NO: 13920 - RNA, 31 nt, synthetic construct
  source 1..31: mol_type = other RNA
ggaagaagcctaccccatagcggaggatgcc

SEQ ID NO: 13921 - RNA, 31 nt, synthetic construct
  source 1..31: mol_type = other RNA
acaggaagaagcccaccccgtcgggaaggat

SEQ ID NO: 13922 - RNA, 30 nt, synthetic construct
  source 1..30: mol_type = other RNA
ccaccccgtagagaaggatgccggatacac

SEQ ID NO: 13923 - RNA, 41 nt, synthetic construct
  source 1..41: mol_type = other RNA
aagaagcccaccccgtcccggaggatgctgacttacacact

SEQ ID NO: 13924 - RNA, 31 nt, synthetic construct
  source 1..31: mol_type = other RNA
agaagcccaacccatagtggaggatgcctgc

SEQ ID NO: 13925 - RNA, 41 nt, synthetic construct
  source 1..41: mol_type = other RNA
aagaagcccaccccgtagaggtagacagcggcatacacact

SEQ ID NO: 13926 - RNA, 32 nt, synthetic construct
  source 1..32: mol_type = other RNA
agaagacacaccccgtagaggaagatgcctgc

SEQ ID NO: 13927 - RNA, 31 nt, synthetic construct
  source 1..31: mol_type = other RNA
acaggaaaaagcccaccccatagcggaggat

SEQ ID NO: 13928 - RNA, 32 nt, synthetic construct
  source 1..32: mol_type = other RNA
agaagctcaacccgtagtggagtgatgcctgc

SEQ ID NO: 13929 - RNA, 23 nt, synthetic construct
  source 1..23: mol_type = other RNA
agaagcccacaccgtatgcctgc

SEQ ID NO: 13930 - RNA, 23 nt, synthetic construct
  source 1..23: mol_type = other RNA
ccaccccgtatgccggcatacac

SEQ ID NO: 13931 - RNA, 31 nt, synthetic construct
  source 1..31: mol_type = other RNA
ccaccacgtagcggaggatgacggcatacac

SEQ ID NO: 13932 - RNA, 29 nt, synthetic construct
  source 1..29: mol_type = other RNA
ggaaggagaccacaccgtaggagaatgcc

SEQ ID NO: 13933 - RNA, 31 nt, synthetic construct
  source 1..31: mol_type = other RNA
ccacctcgtagaggcggatgttggcatacac

SEQ ID NO: 13934 - RNA, 31 nt, synthetic construct
  source 1..31: mol_type = other RNA
agaagccacccccgtagcgggggatgcctgc

SEQ ID NO: 13935 - RNA, 31 nt, synthetic construct
  source 1..31: mol_type = other RNA
ccaccccatagtggaggatgccggtatacac

SEQ ID NO: 13936 - RNA, 31 nt, synthetic construct
  source 1..31: mol_type = other RNA
acaggaagcagcccaacccatagtggaggat

SEQ ID NO: 13937 - RNA, 41 nt, synthetic construct
  source 1..41: mol_type = other RNA
aagaagcccgccccgaagtggcagaatacggcatacacact

SEQ ID NO: 13938 - RNA, 31 nt, synthetic construct
  source 1..31: mol_type = other RNA
ggaagaagtccaccccatagcgaaggatgcc

SEQ ID NO: 13939 - RNA, 43 nt, synthetic construct
  source 1..43: mol_type = other RNA
aagaagcccaccccatagcgaaggatcagccggcatacacact

SEQ ID NO: 13940 - RNA, 30 nt, synthetic construct
  source 1..30: mol_type = other RNA
agaagtcaacctcgtagcgaggatccctgc

SEQ ID NO: 13941 - RNA, 37 nt, synthetic construct
  source 1..37: mol_type = other RNA
ccaccccgtcgcgcgagaaggaatgccgcgcatacac

SEQ ID NO: 13942 - RNA, 46 nt, synthetic construct
  source 1..46: mol_type = other RNA
aagaagcccaccccgtagcggagaaaaaatgtcgtgtgtacacact

SEQ ID NO: 13943 - RNA, 31 nt, synthetic construct
  source 1..31: mol_type = other RNA
ggaagaagtcccctccatagcggactatgcc

SEQ ID NO: 13944 - RNA, 37 nt, synthetic construct
  source 1..37: mol_type = other RNA
aagaagcccaccccgtagcggggccgccatacacact

SEQ ID NO: 13945 - RNA, 41 nt, synthetic construct
  source 1..41: mol_type = other RNA
aagaagcctaccccataacggaggaagccgtcctacacact

SEQ ID NO: 13946 - RNA, 43 nt, synthetic construct
  source 1..43: mol_type = other RNA
agcccaccactagcgaacatgatcccggctatacacactgccc

SEQ ID NO: 13947 - RNA, 33 nt, synthetic construct
  source 1..33: mol_type = other RNA
ccaccactagcgaacatgatcccggctatacac

SEQ ID NO: 13948 - RNA, 31 nt, synthetic construct
  source 1..31: mol_type = other RNA
agaagcccgccccgtaggggaggagacctgc

SEQ ID NO: 13949 - RNA, 31 nt, synthetic construct
  source 1..31: mol_type = other RNA
agaagtccaccccgcagtgggggatgcctgc

SEQ ID NO: 13950 - RNA, 31 nt, synthetic construct
  source 1..31: mol_type = other RNA
agaagcccaccccatagaggaggatgcctgc

SEQ ID NO: 13951 - RNA, 31 nt, synthetic construct
  source 1..31: mol_type = other RNA
ccaccccatagaggaggatgccgtcatacac

SEQ ID NO: 13952 - RNA, 24 nt, synthetic construct
  source 1..24: mol_type = other RNA
ggaagaagcccacaccgtaatgcc

SEQ ID NO: 13953 - RNA, 31 nt, synthetic construct
  source 1..31: mol_type = other RNA
ccaccccgtacaggaggatgacggcatacac

SEQ ID NO: 13954 - RNA, 41 nt, synthetic construct
  source 1..41: mol_type = other RNA
agcccaccacgtagcggaggatgacggcatacacactgccc

SEQ ID NO: 13955 - RNA, 31 nt, synthetic construct
  source 1..31: mol_type = other RNA
ggaagaagaccataccgtagcggaggatgcc

SEQ ID NO: 13956 - RNA, 31 nt, synthetic construct
  source 1..31: mol_type = other RNA
ggaagaagcccgacccgtagcgggggatgcc

SEQ ID NO: 13957 - RNA, 31 nt, synthetic construct
  source 1..31: mol_type = other RNA
acaggaagaagcccgacccgtagcggaggat

SEQ ID NO: 13958 - RNA, 31 nt, synthetic construct
  source 1..31: mol_type = other RNA
ggaagcagcccaacccatagtggaggatgcc

SEQ ID NO: 13959 - RNA, 31 nt, synthetic construct
  source 1..31: mol_type = other RNA
agaagtccaccgcgtagcggggtatgcctgc

SEQ ID NO: 13960 - RNA, 33 nt, synthetic construct
  source 1..33: mol_type = other RNA
acaggaagaaccatacccttcgtagcggaggat

SEQ ID NO: 13961 - RNA, 31 nt, synthetic construct
  source 1..31: mol_type = other RNA
ccaccccatagcggaggatgccggcatacac

SEQ ID NO: 13962 - RNA, 43 nt, synthetic construct
  source 1..43: mol_type = other RNA
aagaagcccaccccgtcgggaccgatgttgttgcatacacact

SEQ ID NO: 13963 - RNA, 31 nt, synthetic construct
  source 1..31: mol_type = other RNA
agaagcccaccccgtagtggaggatgcctgc

SEQ ID NO: 13964 - RNA, 40 nt, synthetic construct
  source 1..40: mol_type = other RNA
ccacctcatggctgacatctagacaagagctggcgtacac

SEQ ID NO: 13965 - RNA, 41 nt, synthetic construct
  source 1..41: mol_type = other RNA
aagaagcccaccccgtagcggaagatgccgcaatacacact

SEQ ID NO: 13966 - RNA, 43 nt, synthetic construct
  source 1..43: mol_type = other RNA
aagaagcccaacccatagtggaggatgccgctcaatacacact

SEQ ID NO: 13967 - RNA, 31 nt, synthetic construct
  source 1..31: mol_type = other RNA
agaagcccaccccgtagcgggggatgcctgc

SEQ ID NO: 13968 - RNA, 27 nt, synthetic construct
  source 1..27: mol_type = other RNA
agaagtacaccccgtagcggggcctgc

SEQ ID NO: 13969 - RNA, 31 nt, synthetic construct
  source 1..31: mol_type = other RNA
acaggaagcagcccacttcagtgcggaggat

SEQ ID NO: 13970 - RNA, 36 nt, synthetic construct
  source 1..36: mol_type = other RNA
aagaagcccaccccgtagcggaggatgatacacact

SEQ ID NO: 13971 - RNA, 31 nt, synthetic construct
  source 1..31: mol_type = other RNA
ggaagaagcacaccccaaggtgacagatgcc

SEQ ID NO: 13972 - RNA, 31 nt, synthetic construct
  source 1..31: mol_type = other RNA
ccaccccaaggtgacagatgcaggcatacac

SEQ ID NO: 13973 - RNA, 31 nt, synthetic construct
  source 1..31: mol_type = other RNA
agaagcccgccccctaggggaggaggcctgc

SEQ ID NO: 13974 - RNA, 41 nt, synthetic construct
  source 1..41: mol_type = other RNA
aagaagcccgccccctaggggaggaggccggcatacacact

SEQ ID NO: 13975 - RNA, 41 nt, synthetic construct
  source 1..41: mol_type = other RNA
aagaagcccaccccgtagtggagactgccggcgtacacact

SEQ ID NO: 13976 - RNA, 31 nt, synthetic construct
  source 1..31: mol_type = other RNA
agaagcccaccccatagaggcgggtgcctgc

SEQ ID NO: 13977 - RNA, 31 nt, synthetic construct
  source 1..31: mol_type = other RNA
ccaccccatagaggcgggtgccgtcatacac

SEQ ID NO: 13978 - RNA, 31 nt, synthetic construct
  source 1..31: mol_type = other RNA
acaggaagaagcccgccccgtacaggaggat

SEQ ID NO: 13979 - RNA, 55 nt, synthetic construct
  source 1..55: mol_type = other RNA
aagaagccgtcacacccgtaatcccaacaagtggagggtcgccggcctacacact

SEQ ID NO: 13980 - RNA, 31 nt, synthetic construct
  source 1..31: mol_type = other RNA
agaagcccaccacgtagcggaggatgcctgc

SEQ ID NO: 13981 - RNA, 41 nt, synthetic construct
  source 1..41: mol_type = other RNA
aagaagcccaccccgtagcggaggatgacggcatacacact

SEQ ID NO: 13982 - RNA, 31 nt, synthetic construct
  source 1..31: mol_type = other RNA
ggaagaaacccaccccatagcgaaggatgcc

SEQ ID NO: 13983 - RNA, 31 nt, synthetic construct
  source 1..31: mol_type = other RNA
agaagccagtctcgtagaggcggatgcctgc

SEQ ID NO: 13984 - RNA, 31 nt, synthetic construct
  source 1..31: mol_type = other RNA
ggaagacacccaccccgtagcggaggatgcc

SEQ ID NO: 13985 - RNA, 31 nt, synthetic construct
  source 1..31: mol_type = other RNA
ccaccccgtagcgggggatgccggcgtacac

SEQ ID NO: 13986 - RNA, 31 nt, synthetic construct
  source 1..31: mol_type = other RNA
agaagcccgacccgtagcgggggatgcctgc

SEQ ID NO: 13987 - RNA, 40 nt, synthetic construct
  source 1..40: mol_type = other RNA
agcccacctcgtagcgaggatcccgcaataaacactgccc

SEQ ID NO: 13988 - RNA, 31 nt, synthetic construct
  source 1..31: mol_type = other RNA
agaaggccacaccgtagcgggggatgcctgc

SEQ ID NO: 13989 - RNA, 31 nt, synthetic construct
  source 1..31: mol_type = other RNA
agaagcccagcccatagcggaaggtgcctgc

SEQ ID NO: 13990 - RNA, 31 nt, synthetic construct
  source 1..31: mol_type = other RNA
acaggaagcagcccagcccatagcggaggat

SEQ ID NO: 13991 - RNA, 41 nt, synthetic construct
  source 1..41: mol_type = other RNA
agcccaccccgtaacgggtgatgctgggatgcccactgccc

SEQ ID NO: 13992 - RNA, 31 nt, synthetic construct
  source 1..31: mol_type = other RNA
agaagtcaaccccgtaacgggtgatgcctgc

SEQ ID NO: 13993 - RNA, 31 nt, synthetic construct
  source 1..31: mol_type = other RNA
acaggcagatgtcaaccccgtaacggaggat

SEQ ID NO: 13994 - RNA, 33 nt, synthetic construct
  source 1..33: mol_type = other RNA
ccaccccgtcgggaccgatgttgttgcatacac

SEQ ID NO: 13995 - RNA, 31 nt, synthetic construct
  source 1..31: mol_type = other RNA
agaagcccagcccgtagcggcggctgcctgc

SEQ ID NO: 13996 - RNA, 31 nt, synthetic construct
  source 1..31: mol_type = other RNA
agaagcccaccccataagggaggatgcctgc

SEQ ID NO: 13997 - RNA, 41 nt, synthetic construct
  source 1..41: mol_type = other RNA
aagaagcccaccccatagcggcagctgacggcctacacact

SEQ ID NO: 13998 - RNA, 31 nt, synthetic construct
  source 1..31: mol_type = other RNA
ccaccccatagcggcagctgacggcctacac

SEQ ID NO: 13999 - RNA, 62 nt, synthetic construct
  source 1..62: mol_type = other RNA
accaccaggaaacacaggaataaatgttcatttcaaatagacccctcttcatggtagctgag

SEQ ID NO: 14000 - RNA, 40 nt, synthetic construct
  source 1..40: mol_type = other RNA
agaagcccaactcatggcggacatctagacaagagcctgc

SEQ ID NO: 14001 - RNA, 43 nt, synthetic construct
  source 1..43: mol_type = other RNA
agcccaccccatagtggaggatgccgctcaatacacactgccc

SEQ ID NO: 14002 - RNA, 33 nt, synthetic construct
  source 1..33: mol_type = other RNA
ccaccccatagtggaggatgccgctcaatacac

SEQ ID NO: 14003 - RNA, 31 nt, synthetic construct
  source 1..31: mol_type = other RNA
agaagcccactccatagcggaagatgcctgc

SEQ ID NO: 14004 - RNA, 31 nt, synthetic construct
  source 1..31: mol_type = other RNA
agaagtccaccccgtagcggaggatgcctgc

SEQ ID NO: 14005 - RNA, 31 nt, synthetic construct
  source 1..31: mol_type = other RNA
ccaccccgtcgtggacgatgccggcatacac

SEQ ID NO: 14006 - RNA, 30 nt, synthetic construct
  source 1..30: mol_type = other RNA
ccaccccgtagtggaaaatgccgaatacac

SEQ ID NO: 14007 - RNA, 31 nt, synthetic construct
  source 1..31: mol_type = other RNA
acaggaagaggctcgacccatagcggaggat

SEQ ID NO: 14008 - RNA, 33 nt, synthetic construct
  source 1..33: mol_type = other RNA
aagaagcccacaccgtatgccggcatacacact

SEQ ID NO: 14009 - RNA, 31 nt, synthetic construct
  source 1..31: mol_type = other RNA
agaagaccaccccgtagcgcaggatgcctgc

SEQ ID NO: 14010 - RNA, 31 nt, synthetic construct
  source 1..31: mol_type = other RNA
agaagaccacaccgtagcggaggaatcctgc

SEQ ID NO: 14011 - RNA, 30 nt, synthetic construct
  source 1..30: mol_type = other RNA
acaggtagaagtcaacctcgtagcgaggat

SEQ ID NO: 14012 - RNA, 31 nt, synthetic construct
  source 1..31: mol_type = other RNA
agaagcctaccccatagcggaggatgcctgc

SEQ ID NO: 14013 - RNA, 36 nt, synthetic construct
  source 1..36: mol_type = other RNA
agaaggccatcccgtagcgcgagaagggatgcctgc

SEQ ID NO: 14014 - RNA, 50 nt, synthetic construct
  source 1..50: mol_type = other RNA
aagaagcccaactcatggcggacatctagacaagagctggcgtacacact

SEQ ID NO: 14015 - RNA, 31 nt, synthetic construct
  source 1..31: mol_type = other RNA
agaagtcccctccatagcggactgtgcctgc

SEQ ID NO: 14016 - RNA, 31 nt, synthetic construct
  source 1..31: mol_type = other RNA
agaagcccaccccgtagcggaagatgcctgc

SEQ ID NO: 14017 - RNA, 38 nt, synthetic construct
  source 1..38: mol_type = other RNA
aacaggaagcccaacccatagtggaggatgcctgcata

SEQ ID NO: 14018 - RNA, 43 nt, synthetic construct
  source 1..43: mol_type = other RNA
agcccaccccatagcggagaatgccgctcaatacacactgccc

SEQ ID NO: 14019 - RNA, 31 nt, synthetic construct
  source 1..31: mol_type = other RNA
agaagcccaccccgtagcgaaggatgcctgc

SEQ ID NO: 14020 - RNA, 31 nt, synthetic construct
  source 1..31: mol_type = other RNA
ggaagacgcccaccccgtagcgagggatgcc

SEQ ID NO: 14021 - RNA, 41 nt, synthetic construct
  source 1..41: mol_type = other RNA
aagaagcccacttcagtgcggacaatgccggcctacacact

SEQ ID NO: 14022 - RNA, 30 nt, synthetic construct
  source 1..30: mol_type = other RNA
agaagctccactagcgaacatgatccctgc

SEQ ID NO: 14023 - RNA, 41 nt, synthetic construct
  source 1..41: mol_type = other RNA
agcccaccccctaggggaggaggccggcatacacactgccc

SEQ ID NO: 14024 - RNA, 31 nt, synthetic construct
  source 1..31: mol_type = other RNA
agaagcccaccccgtagcggaggatgcctgc

SEQ ID NO: 14025 - RNA, 29 nt, synthetic construct
  source 1..29: mol_type = other RNA
agaagaccacaccgtaggagaatgcctgc

SEQ ID NO: 14026 - RNA, 33 nt, synthetic construct
  source 1..33: mol_type = other RNA
ccaccccatagcgaaggatcagccggcatacac

SEQ ID NO: 14027 - RNA, 43 nt, synthetic construct
  source 1..43: mol_type = other RNA
agcccacctcgtagcggaggatgccgcgcaccccacactgccc

SEQ ID NO: 14028 - RNA, 31 nt, synthetic construct
  source 1..31: mol_type = other RNA
agaagcccacctcgtagcggaggatgcctgc

SEQ ID NO: 14029 - RNA, 31 nt, synthetic construct
  source 1..31: mol_type = other RNA
ccaccccatagcggaggatgacggcatacac

SEQ ID NO: 14030 - RNA, 31 nt, synthetic construct
  source 1..31: mol_type = other RNA
ggaagaagacctccccgtagtggaggatgcc

SEQ ID NO: 14031 - RNA, 36 nt, synthetic construct
  source 1..36: mol_type = other RNA
ggaagaagaccatcccgtagcgcgagaagcgatgcc

SEQ ID NO: 14032 - RNA, 31 nt, synthetic construct
  source 1..31: mol_type = other RNA
agaagcccaccccgtcccggaggatgcctgc

SEQ ID NO: 14033 - RNA, 41 nt, synthetic construct
  source 1..41: mol_type = other RNA
ggaaggagcccaactcatggcggacatctagacaagatgcc

SEQ ID NO: 14034 - RNA, 33 nt, synthetic construct
  source 1..33: mol_type = other RNA
ccaccccatagcggagaatgccgctcaatacac

SEQ ID NO: 14035 - RNA, 31 nt, synthetic construct
  source 1..31: mol_type = other RNA
ccaccccatagcggaagatgaaggcatacac

SEQ ID NO: 14036 - RNA, 31 nt, synthetic construct
  source 1..31: mol_type = other RNA
acaggaagaaaattaccccataacggaggat

SEQ ID NO: 14037 - RNA, 31 nt, synthetic construct
  source 1..31: mol_type = other RNA
agaagcccacttcagtgcggacaatgcctgc

SEQ ID NO: 14038 - RNA, 31 nt, synthetic construct
  source 1..31: mol_type = other RNA
ccaccccatagtggaggatgccggcatacac

SEQ ID NO: 14039 - RNA, 31 nt, synthetic construct
  source 1..31: mol_type = other RNA
ccaccccctaggggaggaggccggcatacac

SEQ ID NO: 14040 - RNA, 31 nt, synthetic construct
  source 1..31: mol_type = other RNA
agaagcccaccccgtagtggtcgatgcctgc

SEQ ID NO: 14041 - RNA, 32 nt, synthetic construct
  source 1..32: mol_type = other RNA
ggaagaagacacaccccgtagaggaagatgcc

SEQ ID NO: 14042 - RNA, 31 nt, synthetic construct
  source 1..31: mol_type = other RNA
agaagcccaccccgtagtggagactgcctgc

SEQ ID NO: 14043 - RNA, 32 nt, synthetic construct
  source 1..32: mol_type = other RNA
agaagctcgacccatagcggagtgatgcctgc

SEQ ID NO: 14044 - RNA, 42 nt, synthetic construct
  source 1..42: mol_type = other RNA
aagaagcccgacccatagcggagtgatgccggcatacacact

SEQ ID NO: 14045 - RNA, 31 nt, synthetic construct
  source 1..31: mol_type = other RNA
agaagcccaccccgtaggggaggatgcctgc

SEQ ID NO: 14046 - RNA, 45 nt, synthetic construct
  source 1..45: mol_type = other RNA
agaagctgtcacacccgtaatcccaacaagtggagggtcgcctgc

SEQ ID NO: 14047 - RNA, 44 nt, synthetic construct
  source 1..44: mol_type = other RNA
acaggaacgagctgtcacacccgtaatcccaacaagtggaggat

SEQ ID NO: 14048 - RNA, 41 nt, synthetic construct
  source 1..41: mol_type = other RNA
aagaagcccaccccgtagcgaagggagccggcatacacact

SEQ ID NO: 14049 - RNA, 31 nt, synthetic construct
  source 1..31: mol_type = other RNA
agaagcccgccccgaagtggcagaatcctgc

SEQ ID NO: 14050 - RNA, 29 nt, synthetic construct
  source 1..29: mol_type = other RNA
agaagccttcttcgtagagggatgcctgc

SEQ ID NO: 14051 - RNA, 31 nt, synthetic construct
  source 1..31: mol_type = other RNA
agaagcccagcccgtagcggaggctgcctgc

SEQ ID NO: 14052 - RNA, 31 nt, synthetic construct
  source 1..31: mol_type = other RNA
agaagcccaccccgtaggggaggctgcctgc

SEQ ID NO: 14053 - RNA, 31 nt, synthetic construct
  source 1..31: mol_type = other RNA
agaagccctctccgtagagaaggatgcctgc

SEQ ID NO: 14054 - RNA, 41 nt, synthetic construct
  source 1..41: mol_type = other RNA
aagaagcccaccccataagggaggatgttggcatacacact

SEQ ID NO: 14055 - RNA, 36 nt, synthetic construct
  source 1..36: mol_type = other RNA
agaagcccatcccgtcgcgcgagaaggaatgcctgc

SEQ ID NO: 14056 - RNA, 47 nt, synthetic construct
  source 1..47: mol_type = other RNA
aagaagcccatcccgtcgcgcgagaaggaatgccgcgcatacacact

SEQ ID NO: 14057 - RNA, 28 nt, synthetic construct
  source 1..28: mol_type = other RNA
acaggaagcccaacccatagtggaggat

SEQ ID NO: 14058 - RNA, 31 nt, synthetic construct
  source 1..31: mol_type = other RNA
agaagcccaccccgtagcgagggatgcctgc

SEQ ID NO: 14059 - RNA, 31 nt, synthetic construct
  source 1..31: mol_type = other RNA
agaagattaccccataacggaggaagcctgc

SEQ ID NO: 14060 - RNA, 31 nt, synthetic construct
  source 1..31: mol_type = other RNA
agaagcacaccccaaggtgacagatgcctgc

SEQ ID NO: 14061 - RNA, 41 nt, synthetic construct
  source 1..41: mol_type = other RNA
aagaagcccaccccaaggtgacagatgcaggcatacacact

SEQ ID NO: 14062 - RNA, 31 nt, synthetic construct
  source 1..31: mol_type = other RNA
ggaagaagcccgccccctaggggaggatgcc

SEQ ID NO: 14063 - RNA, 29 nt, synthetic construct
  source 1..29: mol_type = other RNA
agaagtcgaccccgcagtgggatgcctgc

SEQ ID NO: 14064 - RNA, 30 nt, synthetic construct
  source 1..30: mol_type = other RNA
acaggaaaagccaaccccatagcggaggat

SEQ ID NO: 14065 - RNA, 44 nt, synthetic construct
  source 1..44: mol_type = other RNA
ggaaggagctgtcacacccgtaatcccaacaagtggaggatgcc

SEQ ID NO: 14066 - RNA, 31 nt, synthetic construct
  source 1..31: mol_type = other RNA
agaagaccataccgtagcggaggatgcctgc

SEQ ID NO: 14067 - RNA, 31 nt, synthetic construct
  source 1..31: mol_type = other RNA
agaagcccaccccatagcgaaggatgcctgc

SEQ ID NO: 14068 - RNA, 31 nt, synthetic construct
  source 1..31: mol_type = other RNA
agaagcccaccccgaagcggaggatgcctgc

SEQ ID NO: 14069 - RNA, 34 nt, synthetic construct
  source 1..34: mol_type = other RNA
agaagcccaatccgtagcggacagggacgcctgc

SEQ ID NO: 14070 - RNA, 33 nt, synthetic construct
  source 1..33: mol_type = other RNA
agaagtccaccccatagcgaaggatcagcctgc

SEQ ID NO: 14071 - RNA, 41 nt, synthetic construct
  source 1..41: mol_type = other RNA
aagaagccttcttcgtagagggatgcggatgcatacacact

SEQ ID NO: 14072 - RNA, 47 nt, synthetic construct
  source 1..47: mol_type = other RNA
agaagcccaccccgtagctgcggactgagtagctgggattagcctgc

SEQ ID NO: 14073 - RNA, 31 nt, synthetic construct
  source 1..31: mol_type = other RNA
agaagcccaccccgtagagaaggatgcctgc

SEQ ID NO: 14074 - RNA, 31 nt, synthetic construct
  source 1..31: mol_type = other RNA
agaagcccaccccgtagcgtaggatgcctgc

SEQ ID NO: 14075 - RNA, 31 nt, synthetic construct
  source 1..31: mol_type = other RNA
agaagcacaccccacagtggaggatgcctgc

SEQ ID NO: 14076 - RNA, 31 nt, synthetic construct
  source 1..31: mol_type = other RNA
agaagcccaccccgtagaggaggatgcctgc

SEQ ID NO: 14077 - RNA, 31 nt, synthetic construct
  source 1..31: mol_type = other RNA
agaagcccgccccgtacaggaggatgcctgc

SEQ ID NO: 14078 - RNA, 55 nt, synthetic construct
  source 1..55: mol_type = other RNA
aacaggaacgagctgtcacacccgtaatcccaacaagtggagggtcgcctgcata

SEQ ID NO: 14079 - RNA, 31 nt, synthetic construct
  source 1..31: mol_type = other RNA
agaagcccaccccgtagcggcggatgcctgc

SEQ ID NO: 14080 - RNA, 31 nt, synthetic construct
  source 1..31: mol_type = other RNA
agaagcccaccccgtcgggaccgatgcctgc

SEQ ID NO: 14081 - RNA, 31 nt, synthetic construct
  source 1..31: mol_type = other RNA
agaagcccgccccatagcggaggaagcctgc

SEQ ID NO: 14082 - RNA, 47 nt, synthetic construct
  source 1..47: mol_type = other RNA
aacaggaagaaccatacccttcgtagcggacaacggatccctgcata

SEQ ID NO: 14083 - RNA, 31 nt, synthetic construct
  source 1..31: mol_type = other RNA
agaagcccagcccatagcggaggatgcctgc

SEQ ID NO: 14084 - RNA, 31 nt, synthetic construct
  source 1..31: mol_type = other RNA
ccaccccataacggaggaagccgtcctacac

SEQ ID NO: 14085 - RNA, 31 nt, synthetic construct
  source 1..31: mol_type = other RNA
ggaagaggcccagcccgtagcggaggatgcc

SEQ ID NO: 14086 - RNA, 31 nt, synthetic construct
  source 1..31: mol_type = other RNA
ggaagaagccgaccccgtagcggtggatgcc

SEQ ID NO: 14087 - RNA, 41 nt, synthetic construct
  source 1..41: mol_type = other RNA
ttccagtgtggtgatagtgagcattggcccccggttcatgc

SEQ ID NO: 14088 - RNA, 41 nt, synthetic construct
  source 1..41: mol_type = other RNA
ttccagtgtgatgatggtgagtattggcctccggttcatgc

SEQ ID NO: 14089 - RNA, 41 nt, synthetic construct
  source 1..41: mol_type = other RNA
ttccagtgtgatgatgatgaggctgagcctccggttcatgc

SEQ ID NO: 14090 - RNA, 41 nt, synthetic construct
  source 1..41: mol_type = other RNA
ttccagtgcgatgagggtgaggatggacttccggttcatgc

SEQ ID NO: 14091 - RNA, 40 nt, synthetic construct
  source 1..40: mol_type = other RNA
ttccagtgtgtgatggtgagggtgagcctccggttcatgc

SEQ ID NO: 14092 - RNA, 41 nt, synthetic construct
  source 1..41: mol_type = other RNA
ttccagtgtaatgatggtgaggatcggcttccggttcatgc

SEQ ID NO: 14093 - RNA, 41 nt, synthetic construct
  source 1..41: mol_type = other RNA
ttccagtgtgatgatggtgagaaggggcctccggttcatgc

SEQ ID NO: 14094 - RNA, 41 nt, synthetic construct
  source 1..41: mol_type = other RNA
ttccagtgtgatgatggtgaggacggggctccggttcatgc

SEQ ID NO: 14095 - RNA, 41 nt, synthetic construct
  source 1..41: mol_type = other RNA
tgtgatgatgatgaggctgagcctccggttcatgccgccca

SEQ ID NO: 14096 - RNA, 41 nt, synthetic construct
  source 1..41: mol_type = other RNA
ttccagtgtgatgatggtgaggattggcttccggttcatgc

SEQ ID NO: 14097 - RNA, 41 nt, synthetic construct
  source 1..41: mol_type = other RNA
ttccagtgtggtggtggtgtttctgggcctccggttcatgc

SEQ ID NO: 14098 - RNA, 40 nt, synthetic construct
  source 1..40: mol_type = other RNA
ttccagtgtgatatggtgaggatgggcctccagttcatgc

SEQ ID NO: 14099 - RNA, 41 nt, synthetic construct
  source 1..41: mol_type = other RNA
ttccagtgtgctgatggtgacgatgggcccccggttcatgc

SEQ ID NO: 14100 - RNA, 41 nt, synthetic construct
  source 1..41: mol_type = other RNA
ttccagtgtgatgaaagtgaggacaggcctccggttcatgc

SEQ ID NO: 14101 - RNA, 41 nt, synthetic construct
  source 1..41: mol_type = other RNA
ttccagtgtgatggtggtgaaaatgggcctccggttcatgc

SEQ ID NO: 14102 - RNA, 41 nt, synthetic construct
  source 1..41: mol_type = other RNA
ttccagtgtgatgataatgaaggaggacctccggttcatgc

SEQ ID NO: 14103 - RNA, 41 nt, synthetic construct
  source 1..41: mol_type = other RNA
ttccagtgtgatgagggtgagggggggcatccggttcatgc

SEQ ID NO: 14104 - RNA, 41 nt, synthetic construct
  source 1..41: mol_type = other RNA
tgtgatgatagtgagcataggcccccggttcatgccgccca

SEQ ID NO: 14105 - RNA, 41 nt, synthetic construct
  source 1..41: mol_type = other RNA
tgtgatgatggtgtggatcggccgccggttcatgccgccca

SEQ ID NO: 14106 - RNA, 41 nt, synthetic construct
  source 1..41: mol_type = other RNA
ttccagtgtgatgatggtatggatgggtctccggttcatgc

SEQ ID NO: 14107 - RNA, 40 nt, synthetic construct
  source 1..40: mol_type = other RNA
ttccagtgtgatgatggtgagatggacctccagttcatgc

SEQ ID NO: 14108 - RNA, 41 nt, synthetic construct
  source 1..41: mol_type = other RNA
ttccagtgtgatgatggtgaggatgggcatccggttcatgc

SEQ ID NO: 14109 - RNA, 41 nt, synthetic construct
  source 1..41: mol_type = other RNA
ttccagtgtgatgaaggtgaggatggacctccggttcatgc

SEQ ID NO: 14110 - RNA, 43 nt, synthetic construct
  source 1..43: mol_type = other RNA
ttccagtgtgatgatggtgaggatcacggcttccggttcatgc

SEQ ID NO: 14111 - RNA, 41 nt, synthetic construct
  source 1..41: mol_type = other RNA
ttccagtgtgatgatggtgaggaagggcctccggttcatgc

SEQ ID NO: 14112 - RNA, 41 nt, synthetic construct
  source 1..41: mol_type = other RNA
ttccagtgtgatgacggtgctgaggggcctccagttcatgc

SEQ ID NO: 14113 - RNA, 41 nt, synthetic construct
  source 1..41: mol_type = other RNA
ttccagtgtgacgatggtaaggataggcccccggttcatgc

SEQ ID NO: 14114 - RNA, 41 nt, synthetic construct
  source 1..41: mol_type = other RNA
tgtgatgattatgaggatggccctccgatttatgccgccca

SEQ ID NO: 14115 - RNA, 39 nt, synthetic construct
  source 1..39: mol_type = other RNA
tgtgatgatggtaaggataggcccccggtttgccgccca

SEQ ID NO: 14116 - RNA, 42 nt, synthetic construct
  source 1..42: mol_type = other RNA
ttccagtgtgaggatggtgaggattgagcctccggttcatgc

SEQ ID NO: 14117 - RNA, 41 nt, synthetic construct
  source 1..41: mol_type = other RNA
ttccagtgtgatgacggtggtgatgggcctccggttcatgc

SEQ ID NO: 14118 - RNA, 41 nt, synthetic construct
  source 1..41: mol_type = other RNA
ttccagtgtgatgatggtaaggatgggactgcagttcatgc

SEQ ID NO: 14119 - RNA, 40 nt, synthetic construct
  source 1..40: mol_type = other RNA
ttccagtgtgaagttggagaggatgggctccggttcatgc

SEQ ID NO: 14120 - RNA, 41 nt, synthetic construct
  source 1..41: mol_type = other RNA
ttccagtgtgatgatggtgaggataggctgccggttcatgc

SEQ ID NO: 14121 - RNA, 41 nt, synthetic construct
  source 1..41: mol_type = other RNA
tgtgatgataatgaaggaggacctccggttcatgccgccca

SEQ ID NO: 14122 - RNA, 42 nt, synthetic construct
  source 1..42: mol_type = other RNA
ttccagtgtgatgatggtgagagatgggcctccggttcatgc

SEQ ID NO: 14123 - RNA, 41 nt, synthetic construct
  source 1..41: mol_type = other RNA
ttccagtgtaataatcgttaggatggaactccggttcatgc

SEQ ID NO: 14124 - RNA, 41 nt, synthetic construct
  source 1..41: mol_type = other RNA
ttccagtgtgatgatggtgttgatgggcctccggttcatgc

SEQ ID NO: 14125 - RNA, 41 nt, synthetic construct
  source 1..41: mol_type = other RNA
tgtgatgatggtgaggacggggctccggttcatgccgccca

SEQ ID NO: 14126 - RNA, 41 nt, synthetic construct
  source 1..41: mol_type = other RNA
ttccagtgtgatgatggtgaggacatgcctccagttcatgc

SEQ ID NO: 14127 - RNA, 41 nt, synthetic construct
  source 1..41: mol_type = other RNA
ttccagtgtgctgatggtgaggttgggcctccggttcatgc

SEQ ID NO: 14128 - RNA, 41 nt, synthetic construct
  source 1..41: mol_type = other RNA
ttccagtgtggtgatggtaaggatgggcctgcggttcatgc

SEQ ID NO: 14129 - RNA, 41 nt, synthetic construct
  source 1..41: mol_type = other RNA
ttccagtgtgatgatggtgaggccgggcctccggttcatgc

SEQ ID NO: 14130 - RNA, 41 nt, synthetic construct
  source 1..41: mol_type = other RNA
tgtgatgatggtgaggattggcttccggttctagccgccca

SEQ ID NO: 14131 - RNA, 41 nt, synthetic construct
  source 1..41: mol_type = other RNA
ttccagtgtgctggtggtggggatgggcctccggttcatgc

SEQ ID NO: 14132 - RNA, 41 nt, synthetic construct
  source 1..41: mol_type = other RNA
gatggtgagcattggcccccggttcatgccggacatgcagg

SEQ ID NO: 14133 - RNA, 41 nt, synthetic construct
  source 1..41: mol_type = other RNA
ttccagtgtgatggtggtaaggatgggcctccggttcatgc

SEQ ID NO: 14134 - RNA, 41 nt, synthetic construct
  source 1..41: mol_type = other RNA
ttccagtgtggtgatggtgaggatgggcctccggttcatgc

SEQ ID NO: 14135 - RNA, 41 nt, synthetic construct
  source 1..41: mol_type = other RNA
ttccagtgtaatgatggtgaggatgggcctccagttcatgc

SEQ ID NO: 14136 - RNA, 41 nt, synthetic construct
  source 1..41: mol_type = other RNA
ttccagtgggatgatggtggggatgggcctccggttcatgc

SEQ ID NO: 14137 - RNA, 42 nt, synthetic construct
  source 1..42: mol_type = other RNA
tgtgatgatggtgagagatgggcctccggttaatgccgccca

SEQ ID NO: 14138 - RNA, 41 nt, synthetic construct
  source 1..41: mol_type = other RNA
ttccagtgtgatgttggtgaaggtgggcctgcggttcatgc

SEQ ID NO: 14139 - RNA, 41 nt, synthetic construct
  source 1..41: mol_type = other RNA
ttccagtgtggtgatggtgaggatgggtctccggttcatgc

SEQ ID NO: 14140 - RNA, 41 nt, synthetic construct
  source 1..41: mol_type = other RNA
ttccagtgtgatgacggtgagggtgggtatccagttcatgc

SEQ ID NO: 14141 - RNA, 41 nt, synthetic construct
  source 1..41: mol_type = other RNA
tgtgatgatcgttaggatggaactccggttcatgccgccca

SEQ ID NO: 14142 - RNA, 41 nt, synthetic construct
  source 1..41: mol_type = other RNA
ttccagtgtgatgatggtgaggatgggcctccggttcatgc

SEQ ID NO: 14143 - RNA, 41 nt, synthetic construct
  source 1..41: mol_type = other RNA
gatggtgagaatgggcatccagtttgtgccgcccatgcagg

SEQ ID NO: 14144 - RNA, 41 nt, synthetic construct
  source 1..41: mol_type = other RNA
ttccagtgtgatgatggtgaggatgggcttccggttcatgc

SEQ ID NO: 14145 - RNA, 41 nt, synthetic construct
  source 1..41: mol_type = other RNA
ttccagtgtgatggtggtgacgatgggcccccggttcatgc

SEQ ID NO: 14146 - RNA, 41 nt, synthetic construct
  source 1..41: mol_type = other RNA
atgggcctccagttcatgcagcccatgcaggaactgttaca

SEQ ID NO: 14147 - RNA, 41 nt, synthetic construct
  source 1..41: mol_type = other RNA
ttccagtgtgatgatggtgaggatgagcctccagttcatgc

SEQ ID NO: 14148 - RNA, 41 nt, synthetic construct
  source 1..41: mol_type = other RNA
ttccagtgtgatgatagtaaggatgggcctccggttcatgc

SEQ ID NO: 14149 - RNA, 41 nt, synthetic construct
  source 1..41: mol_type = other RNA
gatggtgagggtgggcgtccggttcataccacccatgcagg

SEQ ID NO: 14150 - RNA, 41 nt, synthetic construct
  source 1..41: mol_type = other RNA
ttccagtgtgatggttgtgaggatgggcctccggttcatgc

SEQ ID NO: 14151 - RNA, 41 nt, synthetic construct
  source 1..41: mol_type = other RNA
tgtgatgatggtgtttctgggcctccggttccggccgccca

SEQ ID NO: 14152 - RNA, 41 nt, synthetic construct
  source 1..41: mol_type = other RNA
gatggtgagggtgggcgtccggttcatgccactcatgcagg

SEQ ID NO: 14153 - RNA, 41 nt, synthetic construct
  source 1..41: mol_type = other RNA
ttccagtgcgatgcctgtgaagatgagcctccagttcatgc

SEQ ID NO: 14154 - RNA, 42 nt, synthetic construct
  source 1..42: mol_type = other RNA
tgtgatgatggtgaggatgggcctccggttcgatgccgccca

SEQ ID NO: 14155 - RNA, 41 nt, synthetic construct
  source 1..41: mol_type = other RNA
gatggtgaggatgtgtctccagttcatgcagcccatgcagg

SEQ ID NO: 14156 - RNA, 41 nt, synthetic construct
  source 1..41: mol_type = other RNA
ttccagtgtgataatggtgagaatgggcctccggttcatgc

SEQ ID NO: 14157 - RNA, 41 nt, synthetic construct
  source 1..41: mol_type = other RNA
ttccagtgtgatgatggtaaggatgggcctccggttcatgc

SEQ ID NO: 14158 - RNA, 41 nt, synthetic construct
  source 1..41: mol_type = other RNA
tgtgatgatggtgaggatcggcttccggttctagccgccca

SEQ ID NO: 14159 - RNA, 41 nt, synthetic construct
  source 1..41: mol_type = other RNA
tgtgatgatggtgaggttgggcctccggttcgtgccgccca

SEQ ID NO: 14160 - RNA, 41 nt, synthetic construct
  source 1..41: mol_type = other RNA
gatggtgaggacggggctccggttcatgctggacatgcagg

SEQ ID NO: 14161 - RNA, 41 nt, synthetic construct
  source 1..41: mol_type = other RNA
ttccagtgtgatgagggtgaggatgggcctccggttcatgc

SEQ ID NO: 14162 - RNA, 41 nt, synthetic construct
  source 1..41: mol_type = other RNA
gatggtgaagatgggcctccggcttatggcgcccatgcagg

SEQ ID NO: 14163 - RNA, 41 nt, synthetic construct
  source 1..41: mol_type = other RNA
ttccagtgtgatggtggtggggatgggcctccggttcatgc

SEQ ID NO: 14164 - RNA, 40 nt, synthetic construct
  source 1..40: mol_type = other RNA
ttccagtgtgatgtggtggggctgggcctccggttcatgc

SEQ ID NO: 14165 - RNA, 41 nt, synthetic construct
  source 1..41: mol_type = other RNA
tgtgatgattgtgaggatgggcctccggttcatgccgccca

SEQ ID NO: 14166 - RNA, 41 nt, synthetic construct
  source 1..41: mol_type = other RNA
gatggtgaggttggtcctccggtccatgatgcccatgcagg

SEQ ID NO: 14167 - RNA, 41 nt, synthetic construct
  source 1..41: mol_type = other RNA
ttccagtgtgaagatggcgaggatgggcctccggttcatgc

SEQ ID NO: 14168 - RNA, 41 nt, synthetic construct
  source 1..41: mol_type = other RNA
tgtgatgatggtgaggatgggcctccggttcctgccgccca

SEQ ID NO: 14169 - RNA, 41 nt, synthetic construct
  source 1..41: mol_type = other RNA
tgtgatgatggtggggatgggcctccggttgatgccgccca

SEQ ID NO: 14170 - RNA, 41 nt, synthetic construct
  source 1..41: mol_type = other RNA
ttccagtgtgatgatggttgggatgggcctccagttcatgc

SEQ ID NO: 14171 - RNA, 41 nt, synthetic construct
  source 1..41: mol_type = other RNA
atgggcctccggttcatgccgccaatgcaggaactgttaca

SEQ ID NO: 14172 - RNA, 41 nt, synthetic construct
  source 1..41: mol_type = other RNA
tgtgatgatggtgagggtgggcgtccagttcatgccgccca

SEQ ID NO: 14173 - RNA, 39 nt, synthetic construct
  source 1..39: mol_type = other RNA
gatggtgaggatggccctccgatttatcgcccatgcagg

SEQ ID NO: 14174 - RNA, 31 nt, synthetic construct
  source 1..31: mol_type = other RNA
gtgatgatggtgaggacggggctccggttca

SEQ ID NO: 14175 - RNA, 41 nt, synthetic construct
  source 1..41: mol_type = other RNA
tgtgatgatggtgaggatgggcctccgatttatgccgccca

SEQ ID NO: 14176 - RNA, 41 nt, synthetic construct
  source 1..41: mol_type = other RNA
tgtgatgagggtgaggatggacttccggttctagccgccca

SEQ ID NO: 14177 - RNA, 41 nt, synthetic construct
  source 1..41: mol_type = other RNA
gatggtgagtataggcctccggttcacgtcggccatgcagg

SEQ ID NO: 14178 - RNA, 41 nt, synthetic construct
  source 1..41: mol_type = other RNA
gatggtgaggatcggccgccggttcatgtcgctcatgcagg

SEQ ID NO: 14179 - RNA, 41 nt, synthetic construct
  source 1..41: mol_type = other RNA
tgtgatgatggggggggtgggcgtccggttcatgccgccca

SEQ ID NO: 14180 - RNA, 41 nt, synthetic construct
  source 1..41: mol_type = other RNA
ttccagtgtgatgatggtggggatgtgtctccagttcatgc

SEQ ID NO: 14181 - RNA, 41 nt, synthetic construct
  source 1..41: mol_type = other RNA
gatggtgattctgggcctccggttccggccgcccatgcagg

SEQ ID NO: 14182 - RNA, 41 nt, synthetic construct
  source 1..41: mol_type = other RNA
gatggtgagaatgggcgtccagttcttgacccccatgcagg

SEQ ID NO: 14183 - RNA, 41 nt, synthetic construct
  source 1..41: mol_type = other RNA
gatggtgaggatgggactccagttcatggagcccatgcagg

SEQ ID NO: 14184 - RNA, 41 nt, synthetic construct
  source 1..41: mol_type = other RNA
tgtgatgatggtggggctgggcctccggttcaggccgccca

SEQ ID NO: 14185 - RNA, 41 nt, synthetic construct
  source 1..41: mol_type = other RNA
tgtgatgatggtgagggtgagcctccggtttctgccgccca

SEQ ID NO: 14186 - RNA, 41 nt, synthetic construct
  source 1..41: mol_type = other RNA
tgtgatgatggcgagggtgggcgtccggttcatgccgccca

SEQ ID NO: 14187 - RNA, 41 nt, synthetic construct
  source 1..41: mol_type = other RNA
gatggtgaggatgggcctccggttgatgctgctcatgcagg

SEQ ID NO: 14188 - RNA, 41 nt, synthetic construct
  source 1..41: mol_type = other RNA
tgtgatgatggtaaggttggtcctccggtccatgccgccca

SEQ ID NO: 14189 - RNA, 41 nt, synthetic construct
  source 1..41: mol_type = other RNA
ttccagtgtggtgatggtgaagatgggcctccagttcatgc

SEQ ID NO: 14190 - RNA, 41 nt, synthetic construct
  source 1..41: mol_type = other RNA
atgggcctccagttcatggagcccatgcatgaactgttaca

SEQ ID NO: 14191 - RNA, 41 nt, synthetic construct
  source 1..41: mol_type = other RNA
gatggtgaggatgggcctccggttcatgctgcccatgcagg

SEQ ID NO: 14192 - RNA, 41 nt, synthetic construct
  source 1..41: mol_type = other RNA
ttccagtgtgttgatggtgaggatgggcctccagttcatgc

SEQ ID NO: 14193 - RNA, 41 nt, synthetic construct
  source 1..41: mol_type = other RNA
tgtgatgagggtgagggggggcatccggtttgtgccgccca

SEQ ID NO: 14194 - RNA, 42 nt, synthetic construct
  source 1..42: mol_type = other RNA
gatggtgaggattgagcctccggttactgatgcccatgcagg

SEQ ID NO: 14195 - RNA, 41 nt, synthetic construct
  source 1..41: mol_type = other RNA
gatggtgaggatgggcctccagtttatgccgcccatgcagg

SEQ ID NO: 14196 - RNA, 39 nt, synthetic construct
  source 1..39: mol_type = other RNA
gatggtgaggataggcccccggtttgcagcccatgcagg

SEQ ID NO: 14197 - RNA, 38 nt, synthetic construct
  source 1..38: mol_type = other RNA
ttccagtgtgatgatggtgatgggcatccagttcatgc

SEQ ID NO: 14198 - RNA, 40 nt, synthetic construct
  source 1..40: mol_type = other RNA
ttccagtgtgagggtggtgaagatggcctccagttcatgc

SEQ ID NO: 14199 - RNA, 41 nt, synthetic construct
  source 1..41: mol_type = other RNA
ttccagtgtgatgatggtaatgatgggcctccggttcatgc

SEQ ID NO: 14200 - RNA, 41 nt, synthetic construct
  source 1..41: mol_type = other RNA
tgtgatgatggcgaggatgggcctccggttcatgccgccca

SEQ ID NO: 14201 - RNA, 41 nt, synthetic construct
  source 1..41: mol_type = other RNA
tgtgatgatggtgaggatgggcatccggttcatgccgccca

SEQ ID NO: 14202 - RNA, 41 nt, synthetic construct
  source 1..41: mol_type = other RNA
ttccagtgtgacgatggtgaggataggcctccggttcatgc

SEQ ID NO: 14203 - RNA, 31 nt, synthetic construct
  source 1..31: mol_type = other RNA
gtgatgatggtgtggatcggccgccggttca

SEQ ID NO: 14204 - RNA, 41 nt, synthetic construct
  source 1..41: mol_type = other RNA
atgggcctccagttcacgtcgcccatgcaggaactgttaca

SEQ ID NO: 14205 - RNA, 41 nt, synthetic construct
  source 1..41: mol_type = other RNA
gatggtgagggtgagcctccggtttctgaagcccatgcagg

SEQ ID NO: 14206 - RNA, 41 nt, synthetic construct
  source 1..41: mol_type = other RNA
gatggtgaggacatgcctccagtccgtgccggccatgcagg

SEQ ID NO: 14207 - RNA, 31 nt, synthetic construct
  source 1..31: mol_type = other RNA
gtgatgatgatgaggctgagcctccggttca

SEQ ID NO: 14208 - RNA, 37 nt, synthetic construct
  source 1..37: mol_type = other RNA
gatggtgaggctgagcctccggttcatgccatgcagg

SEQ ID NO: 14209 - RNA, 41 nt, synthetic construct
  source 1..41: mol_type = other RNA
gatggtgaggatgggcctccgatttatgccgcccatgcagg

SEQ ID NO: 14210 - RNA, 41 nt, synthetic construct
  source 1..41: mol_type = other RNA
ttccagtgtgatgatggtgaagatgggcctccggttcatgc

SEQ ID NO: 14211 - RNA, 41 nt, synthetic construct
  source 1..41: mol_type = other RNA
gatggtgaggatggggctccggttaacgccgcccatgcagg

SEQ ID NO: 14212 - RNA, 41 nt, synthetic construct
  source 1..41: mol_type = other RNA
gatggtgaggatgggcctccggttaacgccgcccatgcagg

SEQ ID NO: 14213 - RNA, 41 nt, synthetic construct
  source 1..41: mol_type = other RNA
tgtgatgatggtgaggatgggcctacggttcatgccgccca

SEQ ID NO: 14214 - RNA, 41 nt, synthetic construct
  source 1..41: mol_type = other RNA
tgtgatgacggtgaggatgggtatccggttcatgccgccca

SEQ ID NO: 14215 - RNA, 41 nt, synthetic construct
  source 1..41: mol_type = other RNA
tgtgatgatggtgacgatgggcccccggttcttgccgccca

SEQ ID NO: 14216 - RNA, 41 nt, synthetic construct
  source 1..41: mol_type = other RNA
tgtgatgatggtgttgatgggcctccggttcctgccgccca

SEQ ID NO: 14217 - RNA, 41 nt, synthetic construct
  source 1..41: mol_type = other RNA
ttccagtgtgatgatagtgaggatgggtctccagttcatgc

SEQ ID NO: 14218 - RNA, 41 nt, synthetic construct
  source 1..41: mol_type = other RNA
atgggcctccggcttatggcgcccatgcaagaactgttaca

SEQ ID NO: 14219 - RNA, 41 nt, synthetic construct
  source 1..41: mol_type = other RNA
tgtgatgatggtgaggatgggcctccggttcatgccgccca

SEQ ID NO: 14220 - RNA, 46 nt, synthetic construct
  source 1..46: mol_type = other RNA
gatggtgaggatggacttccggttctaaagaagtcgcccatgcagg

SEQ ID NO: 14221 - RNA, 42 nt, synthetic construct
  source 1..42: mol_type = other RNA
gatggtgagggggggcatccggtttgtgctcgcccatgcagg

SEQ ID NO: 14222 - RNA, 41 nt, synthetic construct
  source 1..41: mol_type = other RNA
tgtgatgatggtgaggaagggcctccggtttatgccgccca

SEQ ID NO: 14223 - RNA, 41 nt, synthetic construct
  source 1..41: mol_type = other RNA
tgtgatgatggtgaagatgggcctccggcttatgccgccca

SEQ ID NO: 14224 - RNA, 41 nt, synthetic construct
  source 1..41: mol_type = other RNA
tgtgatgatggtgaggatgggcctccggttgctgccgccca

SEQ ID NO: 14225 - RNA, 31 nt, synthetic construct
  source 1..31: mol_type = other RNA
gtgatgatggtgaaggtggaactccggttca

SEQ ID NO: 14226 - RNA, 41 nt, synthetic construct
  source 1..41: mol_type = other RNA
ttccagtgtgttgatggtgaggatgggcctccggttcatgc

SEQ ID NO: 14227 - RNA, 41 nt, synthetic construct
  source 1..41: mol_type = other RNA
tgtgatgatggtaaggatgggcctccggattatgccgccca

SEQ ID NO: 14228 - RNA, 41 nt, synthetic construct
  source 1..41: mol_type = other RNA
gatggtgaggatgggcctccggttcatgacgtccatgcagg

SEQ ID NO: 14229 - RNA, 41 nt, synthetic construct
  source 1..41: mol_type = other RNA
tgtgatgatggtttggatgggtctccggttgatgccgccca

SEQ ID NO: 14230 - RNA, 41 nt, synthetic construct
  source 1..41: mol_type = other RNA
ttccagtgtattgattatgaggatggccctccggttcatgc

SEQ ID NO: 14231 - RNA, 41 nt, synthetic construct
  source 1..41: mol_type = other RNA
gatggtgaggatgggccttcggttcatgccgcccatgcagg

SEQ ID NO: 14232 - RNA, 42 nt, synthetic construct
  source 1..42: mol_type = other RNA
tgtgatgatggtgaggattgagcctccggttactgccgccca

SEQ ID NO: 14233 - RNA, 41 nt, synthetic construct
  source 1..41: mol_type = other RNA
tgtgatgatggtgaggatgggcttccggctctagccgccca

SEQ ID NO: 14234 - RNA, 31 nt, synthetic construct
  source 1..31: mol_type = other RNA
gtgatgatggtgaggattggcttccggttca

SEQ ID NO: 14235 - RNA, 41 nt, synthetic construct
  source 1..41: mol_type = other RNA
ttccagtgtgatgatggtgaggatgggcctccagttcatgc

SEQ ID NO: 14236 - RNA, 41 nt, synthetic construct
  source 1..41: mol_type = other RNA
gatggtgaggatgggtctccagttcatgccggccatgcagg

SEQ ID NO: 14237 - RNA, 41 nt, synthetic construct
  source 1..41: mol_type = other RNA
atgggcctccagttaatgccgcccattcaggaactgttaca

SEQ ID NO: 14238 - RNA, 41 nt, synthetic construct
  source 1..41: mol_type = other RNA
tgtgatgatggtgagaatgggcctccggttcatgccgccca

SEQ ID NO: 14239 - RNA, 46 nt, synthetic construct
  source 1..46: mol_type = other RNA
gatggtgaggattggcttccggttctagagaaggcgaccatgcagg

SEQ ID NO: 14240 - RNA, 41 nt, synthetic construct
  source 1..41: mol_type = other RNA
tgtgatgacggtgagggtgggtatccagttcatgccgccca

SEQ ID NO: 14241 - RNA, 41 nt, synthetic construct
  source 1..41: mol_type = other RNA
tgtgatgatggtgaggatgggcttccggttctagccgccca

SEQ ID NO: 14242 - RNA, 41 nt, synthetic construct
  source 1..41: mol_type = other RNA
atgggcctccaatttatgccgtccatggaggaactgttaca

SEQ ID NO: 14243 - RNA, 41 nt, synthetic construct
  source 1..41: mol_type = other RNA
tgtgatgatggtaaggatgggcctccggatcatgccgccca

SEQ ID NO: 14244 - RNA, 31 nt, synthetic construct
  source 1..31: mol_type = other RNA
atggtgaggatgggcctccggttgctgccgc

SEQ ID NO: 14245 - RNA, 46 nt, synthetic construct
  source 1..46: mol_type = other RNA
gatggtgaggatcggcttccggttctagagaagtcgcccatgcagg

SEQ ID NO: 14246 - RNA, 41 nt, synthetic construct
  source 1..41: mol_type = other RNA
tgtgatgatggtgaggatgggcctccggcacatgccgccca

SEQ ID NO: 14247 - RNA, 32 nt, synthetic construct
  source 1..32: mol_type = other RNA
gtgatgatggtgaggattgagcctccggttca

SEQ ID NO: 14248 - RNA, 41 nt, synthetic construct
  source 1..41: mol_type = other RNA
ttccagtgtgatgaaggtggtactggggcttcggttcatgc

SEQ ID NO: 14249 - RNA, 42 nt, synthetic construct
  source 1..42: mol_type = other RNA
ttccagtgtgataaatggtgaggatgggtctccggttcatgc

SEQ ID NO: 14250 - RNA, 41 nt, synthetic construct
  source 1..41: mol_type = other RNA
gatggtgaggataggctgccggttcatgccgtccatgcagg

SEQ ID NO: 14251 - RNA, 31 nt, synthetic construct
  source 1..31: mol_type = other RNA
gtgatgatggtgagaataggcctccggttca

SEQ ID NO: 14252 - RNA, 41 nt, synthetic construct
  source 1..41: mol_type = other RNA
gatggtgaggatgggcctccggttgctgccgcccatgcagg

SEQ ID NO: 14253 - RNA, 41 nt, synthetic construct
  source 1..41: mol_type = other RNA
tgtgatgaaggtgaggatgggactccagttcatgccgccca

SEQ ID NO: 14254 - RNA, 41 nt, synthetic construct
  source 1..41: mol_type = other RNA
tgtgatgatggtgaggatgagcctccaatttatgccgccca

SEQ ID NO: 14255 - RNA, 41 nt, synthetic construct
  source 1..41: mol_type = other RNA
tgtgatgatggtaatgatgggcctccggttctcgccgccca

SEQ ID NO: 14256 - RNA, 31 nt, synthetic construct
  source 1..31: mol_type = other RNA
gtgaggatgggcctccagttcatgtcgccca

SEQ ID NO: 14257 - RNA, 41 nt, synthetic construct
  source 1..41: mol_type = other RNA
tgtgatgatggagagaatgggcgtccagttcttgccgccca

SEQ ID NO: 14258 - RNA, 31 nt, synthetic construct
  source 1..31: mol_type = other RNA
gtgatgatggtaaggataggcccccggttca

SEQ ID NO: 14259 - RNA, 41 nt, synthetic construct
  source 1..41: mol_type = other RNA
tgtgatgaaagtgaggacaggcctccggttcatgccgccca

SEQ ID NO: 14260 - RNA, 31 nt, synthetic construct
  source 1..31: mol_type = other RNA
gtgatgatggtaaggatgggcctgcggttca

SEQ ID NO: 14261 - RNA, 41 nt, synthetic construct
  source 1..41: mol_type = other RNA
ttccagtgtgatgcacgtcaggacgggcctccggttcatgc

SEQ ID NO: 14262 - RNA, 41 nt, synthetic construct
  source 1..41: mol_type = other RNA
tgtgatgatggtgaggatgggcctccggttcgtgccgccca

SEQ ID NO: 14263 - RNA, 41 nt, synthetic construct
  source 1..41: mol_type = other RNA
ttccagtgggatgatggtgaggatgggcctccagttcatgc

SEQ ID NO: 14264 - RNA, 41 nt, synthetic construct
  source 1..41: mol_type = other RNA
tgtgatgatggtgaggatgggcattcagttcatgccgccca

SEQ ID NO: 14265 - RNA, 41 nt, synthetic construct
  source 1..41: mol_type = other RNA
atgggcctccggttgctgccgcccatgcagaaactgttaca

SEQ ID NO: 14266 - RNA, 40 nt, synthetic construct
  source 1..40: mol_type = other RNA
tgtgatgatggtcaggatggaccttcggttcagccgccca

SEQ ID NO: 14267 - RNA, 41 nt, synthetic construct
  source 1..41: mol_type = other RNA
ttccagtgcggtgatggtgaggatgggcctccggttcatgc

SEQ ID NO: 14268 - RNA, 37 nt, synthetic construct
  source 1..37: mol_type = other RNA
atgggcctccggttcatgccatccaggatctgttaca

SEQ ID NO: 14269 - RNA, 31 nt, synthetic construct
  source 1..31: mol_type = other RNA
gtgatggtggtgaaaatgggcctccggttca

SEQ ID NO: 14270 - RNA, 41 nt, synthetic construct
  source 1..41: mol_type = other RNA
atgggcctccagttaataccgcccactcaggaactgttaca

SEQ ID NO: 14271 - RNA, 31 nt, synthetic construct
  source 1..31: mol_type = other RNA
gtgatgatggtgacgatgggcccccggttca

SEQ ID NO: 14272 - RNA, 41 nt, synthetic construct
  source 1..41: mol_type = other RNA
gatggtgagggtgggcgtccagttcatgccgcccatgcagg

SEQ ID NO: 14273 - RNA, 31 nt, synthetic construct
  source 1..31: mol_type = other RNA
gtgatgatagtgagcataggcccccggttca

SEQ ID NO: 14274 - RNA, 41 nt, synthetic construct
  source 1..41: mol_type = other RNA
gatggtgaggatgggcctccagtcgatgtcgcccatgcagg

SEQ ID NO: 14275 - RNA, 41 nt, synthetic construct
  source 1..41: mol_type = other RNA
ttccagtgtgatgaaggtgaggatgggactccagttcatgc

SEQ ID NO: 14276 - RNA, 41 nt, synthetic construct
  source 1..41: mol_type = other RNA
ttccagtgtgatgctggtgaggatgggcctacggttcatgc

SEQ ID NO: 14277 - RNA, 41 nt, synthetic construct
  source 1..41: mol_type = other RNA
gatggtgaggatggaactccggttcatgtcgcccatgcagg

SEQ ID NO: 14278 - RNA, 41 nt, synthetic construct
  source 1..41: mol_type = other RNA
gatggtgaggatgggcctccagttaatgccgcccatgcagg

SEQ ID NO: 14279 - RNA, 41 nt, synthetic construct
  source 1..41: mol_type = other RNA
tgtgatgatggtgaggataggcctccggttcaagccgccca

SEQ ID NO: 14280 - RNA, 44 nt, synthetic construct
  source 1..44: mol_type = other RNA
gatggtgaggatgggcatccggttcatgcagccgaccatgcagg

SEQ ID NO: 14281 - RNA, 41 nt, synthetic construct
  source 1..41: mol_type = other RNA
gatggtgaggatgggcctccggttgatgctacccatgcagg

SEQ ID NO: 14282 - RNA, 41 nt, synthetic construct
  source 1..41: mol_type = other RNA
atgggcctccagtccgtgccggccattccggaactgttaca

SEQ ID NO: 14283 - RNA, 41 nt, synthetic construct
  source 1..41: mol_type = other RNA
tgtgatgagggtgaggatgggcctccgcttcatgccgccca

SEQ ID NO: 14284 - RNA, 31 nt, synthetic construct
  source 1..31: mol_type = other RNA
gtgatgatggtgaggatgggcctccggttca

SEQ ID NO: 14285 - RNA, 41 nt, synthetic construct
  source 1..41: mol_type = other RNA
tgtgatgatggtgaggatgggcctccagttcctgccgccca

SEQ ID NO: 14286 - RNA, 41 nt, synthetic construct
  source 1..41: mol_type = other RNA
tgtgatgatggtgaggataggctgccggttcatgccgccca

SEQ ID NO: 14287 - RNA, 41 nt, synthetic construct
  source 1..41: mol_type = other RNA
atgggcctccggttccggccgcccatgcaggaactgttaca

SEQ ID NO: 14288 - RNA, 41 nt, synthetic construct
  source 1..41: mol_type = other RNA
gatggtgaggatgggcctccggttactgctgcccatgcagg

SEQ ID NO: 14289 - RNA, 41 nt, synthetic construct
  source 1..41: mol_type = other RNA
tgtgatgatggtcaggatgggcctccggttcacgccgccca

SEQ ID NO: 14290 - RNA, 41 nt, synthetic construct
  source 1..41: mol_type = other RNA
ttccagtgtgatgatggtgaggttggattttcggttcatgc

SEQ ID NO: 14291 - RNA, 42 nt, synthetic construct
  source 1..42: mol_type = other RNA
tgtgatgataggtgagaatgggcatccagtttgtgccgccca

SEQ ID NO: 14292 - RNA, 41 nt, synthetic construct
  source 1..41: mol_type = other RNA
tgtgatgatggtgaggatgggtctccgctttatgccgccca

SEQ ID NO: 14293 - RNA, 31 nt, synthetic construct
  source 1..31: mol_type = other RNA
gtgatggtggtgacgatgggcccccggttca

SEQ ID NO: 14294 - RNA, 31 nt, synthetic construct
  source 1..31: mol_type = other RNA
gtgatgatggtgaggatgggcatccggttca

SEQ ID NO: 14295 - RNA, 41 nt, synthetic construct
  source 1..41: mol_type = other RNA
tgtgatgatggtgaggatgggcctccggttactgccgccca

SEQ ID NO: 14296 - RNA, 41 nt, synthetic construct
  source 1..41: mol_type = other RNA
ttccagtgtagtgatggtgaggacgggcctccagttcatgc

SEQ ID NO: 14297 - RNA, 41 nt, synthetic construct
  source 1..41: mol_type = other RNA
gatggtgaggatgggcctccgcttcatgtcgcccatgcagg

SEQ ID NO: 14298 - RNA, 40 nt, synthetic construct
  source 1..40: mol_type = other RNA
gatggtgaggatggaccttcggttcagccgcgcatgcagg

SEQ ID NO: 14299 - RNA, 41 nt, synthetic construct
  source 1..41: mol_type = other RNA
gatggtgaggatgggcctccagttcctgcagcccatgcagg

SEQ ID NO: 14300 - RNA, 46 nt, synthetic construct
  source 1..46: mol_type = other RNA
gatggtgaggatgggcttccggttctagagaagtagcccatgcagg

SEQ ID NO: 14301 - RNA, 41 nt, synthetic construct
  source 1..41: mol_type = other RNA
gatggtgaggatgggcctccggttcctgacgcccatgcagg

SEQ ID NO: 14302 - RNA, 31 nt, synthetic construct
  source 1..31: mol_type = other RNA
atggtgaggctgagcctccggttcatgccgc

SEQ ID NO: 14303 - RNA, 41 nt, synthetic construct
  source 1..41: mol_type = other RNA
gatggtgaggatgagcctccaatttatgccgtccatgcagg

SEQ ID NO: 14304 - RNA, 41 nt, synthetic construct
  source 1..41: mol_type = other RNA
tgtgatgatggtggggatgtgtctccagttcatgccgccca

SEQ ID NO: 14305 - RNA, 41 nt, synthetic construct
  source 1..41: mol_type = other RNA
tgtgatgatggtgaggatgggcctccggcggccgccgccca

SEQ ID NO: 14306 - RNA, 31 nt, synthetic construct
  source 1..31: mol_type = other RNA
gtgatgatggcgagggtgggcgtccggttca

SEQ ID NO: 14307 - RNA, 41 nt, synthetic construct
  source 1..41: mol_type = other RNA
atgggcctccggttgatgtcgaacatgcaggaactgttaca

SEQ ID NO: 14308 - RNA, 41 nt, synthetic construct
  source 1..41: mol_type = other RNA
gatggtgaggatgggtctccggtaaatgctgcccatgcagg

SEQ ID NO: 14309 - RNA, 41 nt, synthetic construct
  source 1..41: mol_type = other RNA
atgggcctccggttcacgtcggccaagcaggaactgttaca

SEQ ID NO: 14310 - RNA, 41 nt, synthetic construct
  source 1..41: mol_type = other RNA
atgggcctgcggttcatgtagcccatgtaggtactgttaca

SEQ ID NO: 14311 - RNA, 41 nt, synthetic construct
  source 1..41: mol_type = other RNA
gatggtgaggatgggtatccggttcatgccgcccatgcagg

SEQ ID NO: 14312 - RNA, 41 nt, synthetic construct
  source 1..41: mol_type = other RNA
gatggtgaggatgggcctccggtttatgccgcccatgcagg

SEQ ID NO: 14313 - RNA, 41 nt, synthetic construct
  source 1..41: mol_type = other RNA
gatggtgaggatgggtctccggttgatgtcgaacatgcagg

SEQ ID NO: 14314 - RNA, 41 nt, synthetic construct
  source 1..41: mol_type = other RNA
gatggtgaggttgggcctccggttcgtgccgcccatgcagg

SEQ ID NO: 14315 - RNA, 31 nt, synthetic construct
  source 1..31: mol_type = other RNA
gtgatgatggtaatgatgggcctccggttca

SEQ ID NO: 14316 - RNA, 41 nt, synthetic construct
  source 1..41: mol_type = other RNA
tgtgatgacggtgctgaggggcctccagttcacgccgccca

SEQ ID NO: 14317 - RNA, 41 nt, synthetic construct
  source 1..41: mol_type = other RNA
gatggtgaggatgggcctccagttcatgccgcccatgcagg

SEQ ID NO: 14318 - RNA, 31 nt, synthetic construct
  source 1..31: mol_type = other RNA
gtgatgatggtgaggatcggcttccggttca

SEQ ID NO: 14319 - RNA, 32 nt, synthetic construct
  source 1..32: mol_type = other RNA
gtgatgatggtgagagatgggcctccggttca

SEQ ID NO: 14320 - RNA, 41 nt, synthetic construct
  source 1..41: mol_type = other RNA
tgtgatgatggtgaggacgggcctccagttaatgccgccca

SEQ ID NO: 14321 - RNA, 41 nt, synthetic construct
  source 1..41: mol_type = other RNA
gatggtgaggatgggcctccagttcatgacgcccatgcagg

SEQ ID NO: 14322 - RNA, 42 nt, synthetic construct
  source 1..42: mol_type = other RNA
gatggtgagggtgggtatccagttcatgctcgcccatgcagg

SEQ ID NO: 14323 - RNA, 31 nt, synthetic construct
  source 1..31: mol_type = other RNA
atggtgaggatgggcctccggttaacgccgc

SEQ ID NO: 14324 - RNA, 41 nt, synthetic construct
  source 1..41: mol_type = other RNA
gatggtgaggatgggcctccggttcgatgcgcccatgcagg

SEQ ID NO: 14325 - RNA, 41 nt, synthetic construct
  source 1..41: mol_type = other RNA
tgtgatgatggtggggatgggcctccggttcatgccgccca

SEQ ID NO: 14326 - RNA, 42 nt, synthetic construct
  source 1..42: mol_type = other RNA
atgggcctccggttcccgccgccccatggaggcactgttaca

SEQ ID NO: 14327 - RNA, 40 nt, synthetic construct
  source 1..40: mol_type = other RNA
ttccagtgtgcgatggtgatgatgggcctccagttcatgc

SEQ ID NO: 14328 - RNA, 41 nt, synthetic construct
  source 1..41: mol_type = other RNA
atgggcctccagtttatgccgcccatgcaggaactgttaca

SEQ ID NO: 14329 - RNA, 41 nt, synthetic construct
  source 1..41: mol_type = other RNA
gatggtgaaaatgggcctccggttcatgccgcccatgcagg

SEQ ID NO: 14330 - RNA, 41 nt, synthetic construct
  source 1..41: mol_type = other RNA
gatggtgagaaggggcctccggttcacgtcgcccatgcagg

SEQ ID NO: 14331 - RNA, 41 nt, synthetic construct
  source 1..41: mol_type = other RNA
gatggtgaggacgggcctccagttaataccgcccatgcagg

SEQ ID NO: 14332 - RNA, 41 nt, synthetic construct
  source 1..41: mol_type = other RNA
gatggtgagaatgggcctccggttcatgccgcccatgcagg

SEQ ID NO: 14333 - RNA, 41 nt, synthetic construct
  source 1..41: mol_type = other RNA
atgggcctccggttaacgccgcccatgcaggaactgttaca

SEQ ID NO: 14334 - RNA, 46 nt, synthetic construct
  source 1..46: mol_type = other RNA
gatggtgaggatgggcttccggctctagagaagcagcccatgcagg

SEQ ID NO: 14335 - RNA, 31 nt, synthetic construct
  source 1..31: mol_type = other RNA
gtgatgatggtgaggatgggcttccggttca

SEQ ID NO: 14336 - RNA, 31 nt, synthetic construct
  source 1..31: mol_type = other RNA
gtgatgatggtggggatgggcctccggttca

SEQ ID NO: 14337 - RNA, 31 nt, synthetic construct
  source 1..31: mol_type = other RNA
gtgaggaagggcctccggtttatgcagccca

SEQ ID NO: 14338 - RNA, 41 nt, synthetic construct
  source 1..41: mol_type = other RNA
gatggtgatgaggggcctccagttcacgtcgcccatgcagg

SEQ ID NO: 14339 - RNA, 41 nt, synthetic construct
  source 1..41: mol_type = other RNA
tgtgatgatggtgaggccgggcctccggttcttgccgccca

SEQ ID NO: 14340 - RNA, 41 nt, synthetic construct
  source 1..41: mol_type = other RNA
gatggtgaggatgggtctccgctttataacggacatgcagg

SEQ ID NO: 14341 - RNA, 41 nt, synthetic construct
  source 1..41: mol_type = other RNA
tgtgatgatggtgaggatgggcctccggttaacgccgccca

SEQ ID NO: 14342 - RNA, 41 nt, synthetic construct
  source 1..41: mol_type = other RNA
gatggtgaggatgggcctccggcacatgttgcccatgcagg

SEQ ID NO: 14343 - RNA, 41 nt, synthetic construct
  source 1..41: mol_type = other RNA
gaggatgggactccagttcatggagcccatgcaggaactgt

SEQ ID NO: 14344 - RNA, 41 nt, synthetic construct
  source 1..41: mol_type = other RNA
tgtgatgatggtgaggatgggcctccagtttatgccgccca

SEQ ID NO: 14345 - RNA, 41 nt, synthetic construct
  source 1..41: mol_type = other RNA
atgggcctccagtttgtgccgcccatgtaggaactgttaca

SEQ ID NO: 14346 - RNA, 31 nt, synthetic construct
  source 1..31: mol_type = other RNA
gtgatgatggtgaggatgggaatccggttca

SEQ ID NO: 14347 - RNA, 41 nt, synthetic construct
  source 1..41: mol_type = other RNA
tgtgatgatggtgaggatgggcctccggtttatgccgccca

SEQ ID NO: 14348 - RNA, 41 nt, synthetic construct
  source 1..41: mol_type = other RNA
gatggtgaggatgggcctacggttcatgccgcccatgcagg

SEQ ID NO: 14349 - RNA, 41 nt, synthetic construct
  source 1..41: mol_type = other RNA
gatggtgaggatgggcctccggattatgccgcccatgcagg

SEQ ID NO: 14350 - RNA, 42 nt, synthetic construct
  source 1..42: mol_type = other RNA
gatggtgaggatgggcctccggttcatgctcgtccatgcagg

SEQ ID NO: 14351 - RNA, 41 nt, synthetic construct
  source 1..41: mol_type = other RNA
atgggcctccggttcatcctgcctatgcaggaactgttaca

SEQ ID NO: 14352 - RNA, 31 nt, synthetic construct
  source 1..31: mol_type = other RNA
atggtgaggatgggcttccggttctagccgc

SEQ ID NO: 14353 - RNA, 57 nt, synthetic construct
  source 1..57: mol_type = other RNA
gatggtgaggatgggcctccggttcataccgctgagtagctgggatcaccatgcagg

SEQ ID NO: 14354 - RNA, 41 nt, synthetic construct
  source 1..41: mol_type = other RNA
atgggcctccagttcatgccggccatgcaggaactgttaca

SEQ ID NO: 14355 - RNA, 41 nt, synthetic construct
  source 1..41: mol_type = other RNA
gatggtgaggccgggcctccggttcttgccgcccatgcagg

SEQ ID NO: 14356 - RNA, 42 nt, synthetic construct
  source 1..42: mol_type = other RNA
atgggcctccagttcatgctcgcccatgcaggaactgttaca

SEQ ID NO: 14357 - RNA, 43 nt, synthetic construct
  source 1..43: mol_type = other RNA
gatggtgaggatgggcctccagttcacgccgccaccatgcagg

SEQ ID NO: 14358 - RNA, 31 nt, synthetic construct
  source 1..31: mol_type = other RNA
gtgatgatggtgaggttgggcctccggttca

SEQ ID NO: 14359 - RNA, 31 nt, synthetic construct
  source 1..31: mol_type = other RNA
gtgatgatggtgagggtgagcctccggttca

SEQ ID NO: 14360 - RNA, 41 nt, synthetic construct
  source 1..41: mol_type = other RNA
gatggtgaggatgggcctccggcggccggcgcccatgcagg

SEQ ID NO: 14361 - RNA, 41 nt, synthetic construct
  source 1..41: mol_type = other RNA
ttccagtgtgaggttggtgaggatgggcctccagttcatgc

SEQ ID NO: 14362 - RNA, 31 nt, synthetic construct
  source 1..31: mol_type = other RNA
gtgatgacggtggtgatgggcctccggttca

SEQ ID NO: 14363 - RNA, 41 nt, synthetic construct
  source 1..41: mol_type = other RNA
gatggtgaaggtgggcctgcggttcatgtagcccatgcagg

SEQ ID NO: 14364 - RNA, 41 nt, synthetic construct
  source 1..41: mol_type = other RNA
tgtgatgaacgtcaggacgggcctccggttcccgccgccca

SEQ ID NO: 14365 - RNA, 41 nt, synthetic construct
  source 1..41: mol_type = other RNA
atgggcctccggttctcgtcgcccatgcagaaactgttaca

SEQ ID NO: 14366 - RNA, 41 nt, synthetic construct
  source 1..41: mol_type = other RNA
tgtgatgatggtgaaaatgggcctccggttcatgccgccca

SEQ ID NO: 14367 - RNA, 41 nt, synthetic construct
  source 1..41: mol_type = other RNA
gatggtgaggatgggactgcagttcatgtggcccatgcagg

SEQ ID NO: 14368 - RNA, 31 nt, synthetic construct
  source 1..31: mol_type = other RNA
gtgatgattatgaggatggccctccggttca

SEQ ID NO: 14369 - RNA, 41 nt, synthetic construct
  source 1..41: mol_type = other RNA
tgtgatgatggtgagaaggggcctccggttcacgccgccca

SEQ ID NO: 14370 - RNA, 45 nt, synthetic construct
  source 1..45: mol_type = other RNA
tgtgatgatggaccatgaggatggggctccggttaacgccgccca

SEQ ID NO: 14371 - RNA, 47 nt, synthetic construct
  source 1..47: mol_type = other RNA
atgggcctccggttctaaagaagtcgcccatgctaggaactgttaca

SEQ ID NO: 14372 - RNA, 41 nt, synthetic construct
  source 1..41: mol_type = other RNA
tgtgatgatggtgatgatgggcctccagttcatgccgccca

SEQ ID NO: 14373 - RNA, 31 nt, synthetic construct
  source 1..31: mol_type = other RNA
gtgatgatggcgaggatgggcctccggttca

SEQ ID NO: 14374 - RNA, 41 nt, synthetic construct
  source 1..41: mol_type = other RNA
tgtgatgatggtgaggatgggcctccagttcatgccgccca

SEQ ID NO: 14375 - RNA, 41 nt, synthetic construct
  source 1..41: mol_type = other RNA
tgtgatgatggtgaggatgggcctccagttaatgccgccca

SEQ ID NO: 14376 - RNA, 40 nt, synthetic construct
  source 1..40: mol_type = other RNA
tgtgatgatggtgagatggacctccagttcatgccgccca

SEQ ID NO: 14377 - RNA, 41 nt, synthetic construct
  source 1..41: mol_type = other RNA
tgtgatgatggtgagtataggcctccggttcacgccgccca

SEQ ID NO: 14378 - RNA, 41 nt, synthetic construct
  source 1..41: mol_type = other RNA
gatggtgatgatgggcctccggttctcgtcgcccatgcagg

SEQ ID NO: 14379 - RNA, 41 nt, synthetic construct
  source 1..41: mol_type = other RNA
gatggtgaggatgggcctccggtttatcgcgcccatgcagg

SEQ ID NO: 14380 - RNA, 31 nt, synthetic construct
  source 1..31: mol_type = other RNA
atggtgagggtgagcctccggtttctgccgc

SEQ ID NO: 14381 - RNA, 31 nt, synthetic construct
  source 1..31: mol_type = other RNA
gtgataatggtgagaatgggcctccggttca

SEQ ID NO: 14382 - RNA, 31 nt, synthetic construct
  source 1..31: mol_type = other RNA
gtgatgatggtgaggataggcctccggttca

SEQ ID NO: 14383 - RNA, 31 nt, synthetic construct
  source 1..31: mol_type = other RNA
gtgatgatggtaaggttggtcctccggttca

SEQ ID NO: 14384 - RNA, 41 nt, synthetic construct
  source 1..41: mol_type = other RNA
gatggtgaggaagggcctccggtttatgcaacccatgcagg

SEQ ID NO: 14385 - RNA, 41 nt, synthetic construct
  source 1..41: mol_type = other RNA
atgggcctccagttcatgtcgcccatgaaggaactgttaca

SEQ ID NO: 14386 - RNA, 31 nt, synthetic construct
  source 1..31: mol_type = other RNA
atggtgagcataggcccccggttcatgccgc

SEQ ID NO: 14387 - RNA, 31 nt, synthetic construct
  source 1..31: mol_type = other RNA
atggtggggatgggcctccggttcatgccgc

SEQ ID NO: 14388 - RNA, 37 nt, synthetic construct
  source 1..37: mol_type = other RNA
tgtgatgatggtgacgatgggcccccggtgccgccca

SEQ ID NO: 14389 - RNA, 41 nt, synthetic construct
  source 1..41: mol_type = other RNA
tgtgatgatggtgaggacatgcctccagtccgtgccgccca

SEQ ID NO: 14390 - RNA, 41 nt, synthetic construct
  source 1..41: mol_type = other RNA
atgggcctccggttcatgccggacatgcaggaactgttaca

SEQ ID NO: 14391 - RNA, 31 nt, synthetic construct
  source 1..31: mol_type = other RNA
gtgatgacggtgaggatgggtatccggttca

SEQ ID NO: 14392 - RNA, 41 nt, synthetic construct
  source 1..41: mol_type = other RNA
gatggtgaggatgggcctgcggttcatgtagcccatgcagg

SEQ ID NO: 14393 - RNA, 53 nt, synthetic construct
  source 1..53: mol_type = other RNA
gatggtgaggatgggcctccggttccaaaaaaaaaaaatgccgcccatgcagg

SEQ ID NO: 14394 - RNA, 41 nt, synthetic construct
  source 1..41: mol_type = other RNA
gaggatgggcctccagttcatgccgcccatgcaggaactgt

SEQ ID NO: 14395 - RNA, 41 nt, synthetic construct
  source 1..41: mol_type = other RNA
tgtgatgatggtgaagatgggcctccagttcctgccgccca

SEQ ID NO: 14396 - RNA, 31 nt, synthetic construct
  source 1..31: mol_type = other RNA
gtgatggtggtggggatgggcctccggttca

SEQ ID NO: 14397 - RNA, 41 nt, synthetic construct
  source 1..41: mol_type = other RNA
tgtgatgatagtgaggatgggtctccagttcatgccgccca

SEQ ID NO: 14398 - RNA, 41 nt, synthetic construct
  source 1..41: mol_type = other RNA
tgtgatgatggtgaaggtgggcctgcggttcatgccgccca

SEQ ID NO: 14399 - RNA, 42 nt, synthetic construct
  source 1..42: mol_type = other RNA
gatggtgagagatgggcctccggttaatcacgaacatgcagg

SEQ ID NO: 14400 - RNA, 41 nt, synthetic construct
  source 1..41: mol_type = other RNA
atgggcctccggttcataccacccatgccggaactgttaca

SEQ ID NO: 14401 - RNA, 41 nt, synthetic construct
  source 1..41: mol_type = other RNA
tgtgatgatggtgaggatgggtctccggtaaatgccgccca

SEQ ID NO: 14402 - RNA, 41 nt, synthetic construct
  source 1..41: mol_type = other RNA
ttccagtgcaatgatggtgaggatgggcctccggttcatgc

SEQ ID NO: 14403 - RNA, 41 nt, synthetic construct
  source 1..41: mol_type = other RNA
atgggcctccggtttatgccgccaatgcaggcactgttaca

SEQ ID NO: 14404 - RNA, 31 nt, synthetic construct
  source 1..31: mol_type = other RNA
gtgatgatggtgaggatgggccaccggttca

SEQ ID NO: 14405 - RNA, 31 nt, synthetic construct
  source 1..31: mol_type = other RNA
gtgatgatggtaaggatgggcctccggttca

SEQ ID NO: 14406 - RNA, 39 nt, synthetic construct
  source 1..39: mol_type = other RNA
atgggcctccggtttgcagcccatgcaggaactgttaca

SEQ ID NO: 14407 - RNA, 31 nt, synthetic construct
  source 1..31: mol_type = other RNA
atggtgaggacggggctccggttcatgccgc

SEQ ID NO: 14408 - RNA, 41 nt, synthetic construct
  source 1..41: mol_type = other RNA
atgggcctgcggttcatgtagcccaagtaggaactgttaca

SEQ ID NO: 14409 - RNA, 42 nt, synthetic construct
  source 1..42: mol_type = other RNA
gatggtgaggacgggcctccggttcccgccgccccatgcagg

SEQ ID NO: 14410 - RNA, 31 nt, synthetic construct
  source 1..31: mol_type = other RNA
atggtgaggatgggcctccggttcgtgccgc

SEQ ID NO: 14411 - RNA, 31 nt, synthetic construct
  source 1..31: mol_type = other RNA
gtgatgagggtgaggatggacttccggttca

SEQ ID NO: 14412 - RNA, 43 nt, synthetic construct
  source 1..43: mol_type = other RNA
atgggcctccggttcatgcaaagcccaggcaggcactgttaca

SEQ ID NO: 14413 - RNA, 31 nt, synthetic construct
  source 1..31: mol_type = other RNA
atggtgaggatgggcctccggttcctgccgc

SEQ ID NO: 14414 - RNA, 41 nt, synthetic construct
  source 1..41: mol_type = other RNA
atgggcctccgatttatgccgcccgtgcacgaactgttaca

SEQ ID NO: 14415 - RNA, 42 nt, synthetic construct
  source 1..42: mol_type = other RNA
gatggtgaggaggacctccggttcatgcaaagcccatgcagg

SEQ ID NO: 14416 - RNA, 31 nt, synthetic construct
  source 1..31: mol_type = other RNA
gtgatgatggtgaggatgagcctccagttca

SEQ ID NO: 14417 - RNA, 31 nt, synthetic construct
  source 1..31: mol_type = other RNA
gtgatggtggtgaggatgggcctccggttca

SEQ ID NO: 14418 - RNA, 41 nt, synthetic construct
  source 1..41: mol_type = other RNA
gatggtgaggatgggcctccggttcacgccgcccatgcagg

SEQ ID NO: 14419 - RNA, 41 nt, synthetic construct
  source 1..41: mol_type = other RNA
atgggcctccggtttatgcaacccaagcgggaactgttaca

SEQ ID NO: 14420 - RNA, 31 nt, synthetic construct
  source 1..31: mol_type = other RNA
atggtgacgatgggcccccggttcttgccgc

SEQ ID NO: 14421 - RNA, 41 nt, synthetic construct
  source 1..41: mol_type = other RNA
tgtgatgatggtaaggatgggcctgcggttcatgccgccca

SEQ ID NO: 14422 - RNA, 41 nt, synthetic construct
  source 1..41: mol_type = other RNA
tgtgatgacggtggtgatgggcctccggttcatgccgccca

SEQ ID NO: 14423 - RNA, 41 nt, synthetic construct
  source 1..41: mol_type = other RNA
atgggcctccggttcacgtcgccccagcaggaactgttaca

SEQ ID NO: 14424 - RNA, 45 nt, synthetic construct
  source 1..45: mol_type = other RNA
gatggtgaggacaggcctccggttcatgcaaaaagcccatgcagg

SEQ ID NO: 14425 - RNA, 31 nt, synthetic construct
  source 1..31: mol_type = other RNA
gtgatgatggtgaggatgggtctccggttca

SEQ ID NO: 14426 - RNA, 31 nt, synthetic construct
  source 1..31: mol_type = other RNA
gtgatgagggtgaggatgggcctccggttca

SEQ ID NO: 14427 - RNA, 41 nt, synthetic construct
  source 1..41: mol_type = other RNA
atgggcctccggttcatgctggacatgcaggaactgttaca

SEQ ID NO: 14428 - RNA, 31 nt, synthetic construct
  source 1..31: mol_type = other RNA
gtgatgaaggtgaggatggacctccggttca

SEQ ID NO: 14429 - RNA, 31 nt, synthetic construct
  source 1..31: mol_type = other RNA
gtgatgatggtgaggacgggcctccagttca

SEQ ID NO: 14430 - RNA, 41 nt, synthetic construct
  source 1..41: mol_type = other RNA
atgggcctccggttcctgtcgcccatgcaggaactgttaca

SEQ ID NO: 14431 - RNA, 41 nt, synthetic construct
  source 1..41: mol_type = other RNA
gatggtgaagatgggcctccagttcctgccgcccatgcagg

SEQ ID NO: 14432 - RNA, 31 nt, synthetic construct
  source 1..31: mol_type = other RNA
gtgatgatggtgaggatgggcctccagttca

SEQ ID NO: 14433 - RNA, 31 nt, synthetic construct
  source 1..31: mol_type = other RNA
atggtgaggatgggcctccagtttatgccgc

SEQ ID NO: 14434 - RNA, 31 nt, synthetic construct
  source 1..31: mol_type = other RNA
ggcctccactttccaacgcccctgcaggaac

SEQ ID NO: 14435 - RNA, 41 nt, synthetic construct
  source 1..41: mol_type = other RNA
atgggcctccggttgatgctacccatgcaggctctgttaca

SEQ ID NO: 14436 - RNA, 41 nt, synthetic construct
  source 1..41: mol_type = other RNA
gatggtgaggatgggtctcccgttggtgccgaccatgcagg

SEQ ID NO: 14437 - RNA, 41 nt, synthetic construct
  source 1..41: mol_type = other RNA
atgggcctccggattatgccgcccgtgcgggaactgttaca

SEQ ID NO: 14438 - RNA, 31 nt, synthetic construct
  source 1..31: mol_type = other RNA
atggtgaggatgggcctccggttcatgccgc

SEQ ID NO: 14439 - RNA, 41 nt, synthetic construct
  source 1..41: mol_type = other RNA
tgtgatgatggttgggatgggcctccagttcacgccgccca

SEQ ID NO: 14440 - RNA, 33 nt, synthetic construct
  source 1..33: mol_type = other RNA
gtgatgatggtgaggatcacggcttccggttca

SEQ ID NO: 14441 - RNA, 31 nt, synthetic construct
  source 1..31: mol_type = other RNA
atggtgaggatgggcctccgatttatgccgc

SEQ ID NO: 14442 - RNA, 41 nt, synthetic construct
  source 1..41: mol_type = other RNA
gatggtgatgatgggcctccggttcatatcgcccatgcagg

SEQ ID NO: 14443 - RNA, 31 nt, synthetic construct
  source 1..31: mol_type = other RNA
gtgatgatggtgaggataggctgccggttca

SEQ ID NO: 14444 - RNA, 31 nt, synthetic construct
  source 1..31: mol_type = other RNA
gtgatgatggtgagaaggggcctccggttca

SEQ ID NO: 14445 - RNA, 39 nt, synthetic construct
  source 1..39: mol_type = other RNA
atgggcctccgatttatcgcccatgcgggaactgttaca

SEQ ID NO: 14446 - RNA, 31 nt, synthetic construct
  source 1..31: mol_type = other RNA
atggtggggatgggcctccggttgatgccgc

SEQ ID NO: 14447 - RNA, 31 nt, synthetic construct
  source 1..31: mol_type = other RNA
atggtgaggatgggtatccggttcatgccgc

SEQ ID NO: 14448 - RNA, 41 nt, synthetic construct
  source 1..41: mol_type = other RNA
atgggcctccagttcatgccgcccatgcaggaactgttaca

SEQ ID NO: 14449 - RNA, 31 nt, synthetic construct
  source 1..31: mol_type = other RNA
gtgatgatggtgaagatgggcctccggttca

SEQ ID NO: 14450 - RNA, 41 nt, synthetic construct
  source 1..41: mol_type = other RNA
atgggcctccggttcaggccgcccatgcaggaactgttaca

SEQ ID NO: 14451 - RNA, 32 nt, synthetic construct
  source 1..32: mol_type = other RNA
atggtgaggatgggcctccggttcgatgccgc

SEQ ID NO: 14452 - RNA, 41 nt, synthetic construct
  source 1..41: mol_type = other RNA
tgtgatgatgctgaggatgggccttcggttcatgccgccca

SEQ ID NO: 14453 - RNA, 41 nt, synthetic construct
  source 1..41: mol_type = other RNA
gaggatgggcctccggttcatgccgccaatgcaggaactgt

SEQ ID NO: 14454 - RNA, 31 nt, synthetic construct
  source 1..31: mol_type = other RNA
atggtgaggacaggcctccggttcatgccgc

SEQ ID NO: 14455 - RNA, 41 nt, synthetic construct
  source 1..41: mol_type = other RNA
gatggtgaggctgggcctccggttcaggccgcccatgcagg

SEQ ID NO: 14456 - RNA, 31 nt, synthetic construct
  source 1..31: mol_type = other RNA
atggtgaggatgggtctccagttcatgccgc

SEQ ID NO: 14457 - RNA, 31 nt, synthetic construct
  source 1..31: mol_type = other RNA
atggtgaggatgggcatccggttcatgccgc

SEQ ID NO: 14458 - RNA, 31 nt, synthetic construct
  source 1..31: mol_type = other RNA
gtgatgagggtgagggggggcatccggttca

SEQ ID NO: 14459 - RNA, 41 nt, synthetic construct
  source 1..41: mol_type = other RNA
atgggcctccggttcatgacgtccatgcaggggctgttaca

SEQ ID NO: 14460 - RNA, 31 nt, synthetic construct
  source 1..31: mol_type = other RNA
atggtgaggatgggcctccggcacatgccgc

SEQ ID NO: 14461 - RNA, 41 nt, synthetic construct
  source 1..41: mol_type = other RNA
atgggcctccagtcgatgtcgcctgtgcaggacctgttaca

SEQ ID NO: 14462 - RNA, 31 nt, synthetic construct
  source 1..31: mol_type = other RNA
gtgatgatggtgttgatgggcctccggttca

SEQ ID NO: 14463 - RNA, 41 nt, synthetic construct
  source 1..41: mol_type = other RNA
atgggcctccggttcatatcgcccatgtaggatctgttaca

SEQ ID NO: 14464 - RNA, 45 nt, synthetic construct
  source 1..45: mol_type = other RNA
atgggcctccggttcatgcagccgaccatgctaggaactgttaca

SEQ ID NO: 14465 - RNA, 41 nt, synthetic construct
  source 1..41: mol_type = other RNA
atgggcctccggcacatgttgcccgtactggaactgttaca

SEQ ID NO: 14466 - RNA, 31 nt, synthetic construct
  source 1..31: mol_type = other RNA
atggtgggggtgggcgtccggttcatgccgc

SEQ ID NO: 14467 - RNA, 47 nt, synthetic construct
  source 1..47: mol_type = other RNA
atgggcctccggttctagagaagtagcccatgctaggaactgttaca

SEQ ID NO: 14468 - RNA, 31 nt, synthetic construct
  source 1..31: mol_type = other RNA
gtgatgatggtgaggaagggcctccggttca

SEQ ID NO: 14469 - RNA, 29 nt, synthetic construct
  source 1..29: mol_type = other RNA
atggtaaggataggcccccggtttgccgc

SEQ ID NO: 14470 - RNA, 31 nt, synthetic construct
  source 1..31: mol_type = other RNA
gtgatgatggtgaggccgggcctccggttca

SEQ ID NO: 14471 - RNA, 31 nt, synthetic construct
  source 1..31: mol_type = other RNA
atggtgagaataggcctccggttcacgccgc

SEQ ID NO: 14472 - RNA, 31 nt, synthetic construct
  source 1..31: mol_type = other RNA
gtgaggatgggcctccggttcatgacgccca

SEQ ID NO: 14473 - RNA, 31 nt, synthetic construct
  source 1..31: mol_type = other RNA
atggtgaggatggccctccgatttatgccgc

SEQ ID NO: 14474 - RNA, 41 nt, synthetic construct
  source 1..41: mol_type = other RNA
ttccagtgtgccgatggtgaggatgggcattcagttcatgc

SEQ ID NO: 14475 - RNA, 41 nt, synthetic construct
  source 1..41: mol_type = other RNA
ttccagtgtgctgatggagagaatgggcgtccagttcatgc

SEQ ID NO: 14476 - RNA, 31 nt, synthetic construct
  source 1..31: mol_type = other RNA
atggtgaggatgggcttccggctctagccgc

SEQ ID NO: 14477 - RNA, 42 nt, synthetic construct
  source 1..42: mol_type = other RNA
atgggcctccggtttgtgctcgccaatacaggaactgttaca

SEQ ID NO: 14478 - RNA, 31 nt, synthetic construct
  source 1..31: mol_type = other RNA
atggtgaggataggcctccggttcaagccgc

SEQ ID NO: 14479 - RNA, 41 nt, synthetic construct
  source 1..41: mol_type = other RNA
gatggtgaggttggattttcggttaataccgcccatgcagg

SEQ ID NO: 14480 - RNA, 41 nt, synthetic construct
  source 1..41: mol_type = other RNA
atgggcctccggttcatgtcgcccatgcgggaactgttaca

SEQ ID NO: 14481 - RNA, 41 nt, synthetic construct
  source 1..41: mol_type = other RNA
ttccagtgtgatgatgctgaggatgggccttcggttcatgc

SEQ ID NO: 14482 - RNA, 31 nt, synthetic construct
  source 1..31: mol_type = other RNA
gtgatgacggtgaggatgggcctccagttca

SEQ ID NO: 14483 - RNA, 36 nt, synthetic construct
  source 1..36: mol_type = other RNA
gaggatgggcctccggttcatgccgccaggaactgt

SEQ ID NO: 14484 - RNA, 41 nt, synthetic construct
  source 1..41: mol_type = other RNA
tgtgatgatggtaaggatgggactgcagttcatgccgccca

SEQ ID NO: 14485 - RNA, 31 nt, synthetic construct
  source 1..31: mol_type = other RNA
atggtgaagatgggcctccggcttatgccgc

SEQ ID NO: 14486 - RNA, 41 nt, synthetic construct
  source 1..41: mol_type = other RNA
atgggcctccggttaatcacgaagatgcaggaactgttaca

SEQ ID NO: 14487 - RNA, 30 nt, synthetic construct
  source 1..30: mol_type = other RNA
gtgatgttggagaggatgggctccggttca

SEQ ID NO: 14488 - RNA, 31 nt, synthetic construct
  source 1..31: mol_type = other RNA
atggtgaggatgggactccagttcatgccgc

SEQ ID NO: 14489 - RNA, 41 nt, synthetic construct
  source 1..41: mol_type = other RNA
gatggtgatgatgggcctccggttcctgtcgcccatgcagg

SEQ ID NO: 14490 - RNA, 31 nt, synthetic construct
  source 1..31: mol_type = other RNA
atggtgaggatgggcctccggtttatgccgc

SEQ ID NO: 14491 - RNA, 41 nt, synthetic construct
  source 1..41: mol_type = other RNA
atgggcctccggttaacgccgcccatgcgggaactgttaca

SEQ ID NO: 14492 - RNA, 31 nt, synthetic construct
  source 1..31: mol_type = other RNA
gtgaggatgggcctccggttcctgtcgccca

SEQ ID NO: 14493 - RNA, 41 nt, synthetic construct
  source 1..41: mol_type = other RNA
atgggcctccggttcatgctgcccatgcaggaactgttaca

SEQ ID NO: 14494 - RNA, 31 nt, synthetic construct
  source 1..31: mol_type = other RNA
atggtaatgatgggcctccggttctcgccgc

SEQ ID NO: 14495 - RNA, 31 nt, synthetic construct
  source 1..31: mol_type = other RNA
atggtgaggatgggtctccggtaaatgccgc

SEQ ID NO: 14496 - RNA, 31 nt, synthetic construct
  source 1..31: mol_type = other RNA
ggcctccagttcatgccgcccatgcaggaac

SEQ ID NO: 14497 - RNA, 31 nt, synthetic construct
  source 1..31: mol_type = other RNA
gtgaggatgggcctccggttgatgctgccca

SEQ ID NO: 14498 - RNA, 33 nt, synthetic construct
  source 1..33: mol_type = other RNA
ggcctccggttcatgcaaagcccaggcaggaac

SEQ ID NO: 14499 - RNA, 31 nt, synthetic construct
  source 1..31: mol_type = other RNA
atggtgaggatgggcctccgcttcatgccgc

SEQ ID NO: 14500 - RNA, 41 nt, synthetic construct
  source 1..41: mol_type = other RNA
gaggatgggcctccggtttatgccgccaatgcaggaactgt

SEQ ID NO: 14501 - RNA, 53 nt, synthetic construct
  source 1..53: mol_type = other RNA
tgtgatgatagtaaggatgggcctccggttccaaaaaaaaaaaatgccgccca

SEQ ID NO: 14502 - RNA, 31 nt, synthetic construct
  source 1..31: mol_type = other RNA
gtgaggatgggcctccggttcatgctgccca

SEQ ID NO: 14503 - RNA, 31 nt, synthetic construct
  source 1..31: mol_type = other RNA
gtgatgatggtgaagatgggcctccagttca

SEQ ID NO: 14504 - RNA, 31 nt, synthetic construct
  source 1..31: mol_type = other RNA
atggtgaggatgggcctccagttcatgccgc

SEQ ID NO: 14505 - RNA, 41 nt, synthetic construct
  source 1..41: mol_type = other RNA
gatggtgaggataggcctccggttcaagccgcccatgcagg

SEQ ID NO: 14506 - RNA, 31 nt, synthetic construct
  source 1..31: mol_type = other RNA
atggtgagaaggggcctccggttcacgccgc

SEQ ID NO: 14507 - RNA, 31 nt, synthetic construct
  source 1..31: mol_type = other RNA
gtgatggtggggggggtgggcgtccggttca

SEQ ID NO: 14508 - RNA, 40 nt, synthetic construct
  source 1..40: mol_type = other RNA
atgggcctccggttaacgccgcccatgaggaactgttaca

SEQ ID NO: 14509 - RNA, 46 nt, synthetic construct
  source 1..46: mol_type = other RNA
ttccagtgtgcaactctgacggtgaggatgggtatccggttcatgc

SEQ ID NO: 14510 - RNA, 31 nt, synthetic construct
  source 1..31: mol_type = other RNA
gtgatggtggtgtttctgggcctccggttca

SEQ ID NO: 14511 - RNA, 31 nt, synthetic construct
  source 1..31: mol_type = other RNA
atggtggggctgggcctccggttcaggccgc

SEQ ID NO: 14512 - RNA, 31 nt, synthetic construct
  source 1..31: mol_type = other RNA
atggtgaggataggctgccggttcatgccgc

SEQ ID NO: 14513 - RNA, 41 nt, synthetic construct
  source 1..41: mol_type = other RNA
atgggcctccggttcatgccgcccatgtaggaactgttaca

SEQ ID NO: 14514 - RNA, 41 nt, synthetic construct
  source 1..41: mol_type = other RNA
gaggatgggtctccagttcatgcagcccatgcaggaactgt

SEQ ID NO: 14515 - RNA, 31 nt, synthetic construct
  source 1..31: mol_type = other RNA
atggtgagggtgggtatccagttcatgccgc

SEQ ID NO: 14516 - RNA, 41 nt, synthetic construct
  source 1..41: mol_type = other RNA
atgggcctccggtaaatgctgccaatgcaggcactgttaca

SEQ ID NO: 14517 - RNA, 31 nt, synthetic construct
  source 1..31: mol_type = other RNA
gtgatgttggtgaaggtgggcctgcggttca

SEQ ID NO: 14518 - RNA, 41 nt, synthetic construct
  source 1..41: mol_type = other RNA
atgggcctccagttcctgccgcctgtgcaagacctgttaca

SEQ ID NO: 14519 - RNA, 41 nt, synthetic construct
  source 1..41: mol_type = other RNA
atgggcctccagttcatgacgccactgcaggacctgttaca

SEQ ID NO: 14520 - RNA, 41 nt, synthetic construct
  source 1..41: mol_type = other RNA
gaggatgggcgtccagttcatgccgccaatgcaggaactgt

SEQ ID NO: 14521 - RNA, 31 nt, synthetic construct
  source 1..31: mol_type = other RNA
gtgatgcaggtgaggatgggcctccggttca

SEQ ID NO: 14522 - RNA, 31 nt, synthetic construct
  source 1..31: mol_type = other RNA
atggtgaggatcggcttccggttctagccgc

SEQ ID NO: 14523 - RNA, 31 nt, synthetic construct
  source 1..31: mol_type = other RNA
ggcctccagttcatggagcccatgcaggaac

SEQ ID NO: 14524 - RNA, 32 nt, synthetic construct
  source 1..32: mol_type = other RNA
atggtgagagatgggcctccggttaatgccgc

SEQ ID NO: 14525 - RNA, 31 nt, synthetic construct
  source 1..31: mol_type = other RNA
atggtgaaggtgggcctgcggttcatgccgc

SEQ ID NO: 14526 - RNA, 31 nt, synthetic construct
  source 1..31: mol_type = other RNA
gtgatggttgtgaggatgggcctccggttca

SEQ ID NO: 14527 - RNA, 31 nt, synthetic construct
  source 1..31: mol_type = other RNA
atggtgaggattggcttccggttctagccgc

SEQ ID NO: 14528 - RNA, 31 nt, synthetic construct
  source 1..31: mol_type = other RNA
atggtgagggggggcatccggtttgtgccgc

SEQ ID NO: 14529 - RNA, 31 nt, synthetic construct
  source 1..31: mol_type = other RNA
atggtgtggatcggccgccggttcatgccgc

SEQ ID NO: 14530 - RNA, 41 nt, synthetic construct
  source 1..41: mol_type = other RNA
gaggatgggcctccggttgatgctacccatgcaggaactgt

SEQ ID NO: 14531 - RNA, 31 nt, synthetic construct
  source 1..31: mol_type = other RNA
gtgatgatagtgaggatgggtctccagttca

SEQ ID NO: 14532 - RNA, 41 nt, synthetic construct
  source 1..41: mol_type = other RNA
gatggtgaggatgggcctccggttcgtgaagcccatgcagg

SEQ ID NO: 14533 - RNA, 32 nt, synthetic construct
  source 1..32: mol_type = other RNA
gtgaggatgggcctccggttcatgctcgccca

SEQ ID NO: 14534 - RNA, 31 nt, synthetic construct
  source 1..31: mol_type = other RNA
gtgaggatgggcctccggatcatgccgccca

SEQ ID NO: 14535 - RNA, 31 nt, synthetic construct
  source 1..31: mol_type = other RNA
ggcctccggtccatgatgcccgtggaggaac

SEQ ID NO: 14536 - RNA, 31 nt, synthetic construct
  source 1..31: mol_type = other RNA
atggtgttgatgggcctccggttcctgccgc

SEQ ID NO: 14537 - RNA, 30 nt, synthetic construct
  source 1..30: mol_type = other RNA
gtgatgtggtggggctgggcctccggttca

SEQ ID NO: 14538 - RNA, 41 nt, synthetic construct
  source 1..41: mol_type = other RNA
atgggcctccgcttcatgtcgcccatgcgggaactgttaca

SEQ ID NO: 14539 - RNA, 41 nt, synthetic construct
  source 1..41: mol_type = other RNA
gaggatgggcctccggttaacgccgcccatgcaggaactgt

SEQ ID NO: 14540 - RNA, 27 nt, synthetic construct
  source 1..27: mol_type = other RNA
ggcctccggttcatgccatccaggaac

SEQ ID NO: 14541 - RNA, 31 nt, synthetic construct
  source 1..31: mol_type = other RNA
ggcctccggcttatggcgcccatgcaggaac

SEQ ID NO: 14542 - RNA, 41 nt, synthetic construct
  source 1..41: mol_type = other RNA
gaggatgggcctccggcttatggcgcccatgcaggaactgt

SEQ ID NO: 14543 - RNA, 41 nt, synthetic construct
  source 1..41: mol_type = other RNA
gaggatggccctccggttcatcctgcctatgcaggaactgt

SEQ ID NO: 14544 - RNA, 31 nt, synthetic construct
  source 1..31: mol_type = other RNA
atggtgaggatggacttccggttctagccgc

SEQ ID NO: 14545 - RNA, 43 nt, synthetic construct
  source 1..43: mol_type = other RNA
gaggatggacctccggttcatgcaaagcccaggcaggaactgt

SEQ ID NO: 14546 - RNA, 38 nt, synthetic construct
  source 1..38: mol_type = other RNA
gatggtgatgggcatccagtttatgccgcccatgcagg

SEQ ID NO: 14547 - RNA, 30 nt, synthetic construct
  source 1..30: mol_type = other RNA
gtgaggctgagcctccggttcatgcgccca

SEQ ID NO: 14548 - RNA, 31 nt, synthetic construct
  source 1..31: mol_type = other RNA
gtgatgatggtatggatgggtctccggttca

SEQ ID NO: 14549 - RNA, 30 nt, synthetic construct
  source 1..30: mol_type = other RNA
atggtgagatggacctccagttcatgccgc

SEQ ID NO: 14550 - RNA, 31 nt, synthetic construct
  source 1..31: mol_type = other RNA
gtgatgatggtgatgatgggcctccagttca

SEQ ID NO: 14551 - RNA, 31 nt, synthetic construct
  source 1..31: mol_type = other RNA
atggtggtgatgggcctccggttcatgccgc

SEQ ID NO: 14552 - RNA, 29 nt, synthetic construct
  source 1..29: mol_type = other RNA
ggcctccgatttatcgcccatgcgggaac

SEQ ID NO: 14553 - RNA, 31 nt, synthetic construct
  source 1..31: mol_type = other RNA
gtgatggtggtaaggatgggcctccggttca

SEQ ID NO: 14554 - RNA, 31 nt, synthetic construct
  source 1..31: mol_type = other RNA
atggtcaggacgggcctccggttcccgccgc

SEQ ID NO: 14555 - RNA, 31 nt, synthetic construct
  source 1..31: mol_type = other RNA
gtgataatggtcaggatgggcctccggttca

SEQ ID NO: 14556 - RNA, 46 nt, synthetic construct
  source 1..46: mol_type = other RNA
atgggcctccggttcatgcaaaaagcctattgtgggaactgttaca

SEQ ID NO: 14557 - RNA, 31 nt, synthetic construct
  source 1..31: mol_type = other RNA
ggcctccagttcatgccggccatgcaggaac

SEQ ID NO: 14558 - RNA, 41 nt, synthetic construct
  source 1..41: mol_type = other RNA
atgggcctccggttcaagccgcctgtgcaggaactgttaca

SEQ ID NO: 14559 - RNA, 31 nt, synthetic construct
  source 1..31: mol_type = other RNA
atggtgaaaatgggcctccggttcatgccgc

SEQ ID NO: 14560 - RNA, 41 nt, synthetic construct
  source 1..41: mol_type = other RNA
atgggcctccggtttatgccgcccctacgggaactgttaca

SEQ ID NO: 14561 - RNA, 31 nt, synthetic construct
  source 1..31: mol_type = other RNA
ggcctccagtttatgccgcccatgcaggaac

SEQ ID NO: 14562 - RNA, 41 nt, synthetic construct
  source 1..41: mol_type = other RNA
tgtgatgatggttaggatgggtctcccgttggtgccgccca

SEQ ID NO: 14563 - RNA, 32 nt, synthetic construct
  source 1..32: mol_type = other RNA
atggtgaggattgagcctccggttactgccgc

SEQ ID NO: 14564 - RNA, 31 nt, synthetic construct
  source 1..31: mol_type = other RNA
gtgaggatgggcctccggttcgtgaagccca

SEQ ID NO: 14565 - RNA, 31 nt, synthetic construct
  source 1..31: mol_type = other RNA
gtgatgatagtaaggatgggcctccggttca

SEQ ID NO: 14566 - RNA, 31 nt, synthetic construct
  source 1..31: mol_type = other RNA
gtgaggatgggcctccggtttatcgcgccca

SEQ ID NO: 14567 - RNA, 31 nt, synthetic construct
  source 1..31: mol_type = other RNA
gtgaggatgggcctccggttactgctgccca

SEQ ID NO: 14568 - RNA, 41 nt, synthetic construct
  source 1..41: mol_type = other RNA
gaggatgggcatccagtttgtgccgcccatgtaggaactgt

SEQ ID NO: 14569 - RNA, 44 nt, synthetic construct
  source 1..44: mol_type = other RNA
atgggcctccagttcacgccgccaccatgcatggatctgttaca

SEQ ID NO: 14570 - RNA, 31 nt, synthetic construct
  source 1..31: mol_type = other RNA
ggcctccggattatgccgcccgtgcgggaac

SEQ ID NO: 14571 - RNA, 41 nt, synthetic construct
  source 1..41: mol_type = other RNA
atgggcctccggttcgtgccgcccatgctggaactgttaca

SEQ ID NO: 14572 - RNA, 31 nt, synthetic construct
  source 1..31: mol_type = other RNA
ggcctccggttcaagccgcctgtgcaggaac

SEQ ID NO: 14573 - RNA, 31 nt, synthetic construct
  source 1..31: mol_type = other RNA
atggtgatgatgggcctccagttcatgccgc

SEQ ID NO: 14574 - RNA, 41 nt, synthetic construct
  source 1..41: mol_type = other RNA
atgggcctccggtccatgatgcccgtggaggacctgttaca

SEQ ID NO: 14575 - RNA, 31 nt, synthetic construct
  source 1..31: mol_type = other RNA
gtgatgacggtgagggtgggtatccagttca

SEQ ID NO: 14576 - RNA, 41 nt, synthetic construct
  source 1..41: mol_type = other RNA
gaggatgggcctccggttgatgctgctcatgcaggaactgt

SEQ ID NO: 14577 - RNA, 29 nt, synthetic construct
  source 1..29: mol_type = other RNA
ggcctccggtttgcagcccatgcaggaac

SEQ ID NO: 14578 - RNA, 41 nt, synthetic construct
  source 1..41: mol_type = other RNA
atgggcctccggttcttgccgcccgtgcaggatctgttaca

SEQ ID NO: 14579 - RNA, 36 nt, synthetic construct
  source 1..36: mol_type = other RNA
ggcctccggttcatgcaaaaagcctattgtgggaac

SEQ ID NO: 14580 - RNA, 41 nt, synthetic construct
  source 1..41: mol_type = other RNA
gaggatgggtctccagttcatgccggccatgcaggaactgt

SEQ ID NO: 14581 - RNA, 31 nt, synthetic construct
  source 1..31: mol_type = other RNA
gtgatgatggtggggatgtgtctccagttca

SEQ ID NO: 14582 - RNA, 31 nt, synthetic construct
  source 1..31: mol_type = other RNA
atggtgaggatgggcctacggttcatgccgc

SEQ ID NO: 14583 - RNA, 31 nt, synthetic construct
  source 1..31: mol_type = other RNA
atggtgaggttgggcctccggttcgtgccgc

SEQ ID NO: 14584 - RNA, 41 nt, synthetic construct
  source 1..41: mol_type = other RNA
atgggcctgcagttcatgtggcccatgtagggactgttaca

SEQ ID NO: 14585 - RNA, 40 nt, synthetic construct
  source 1..40: mol_type = other RNA
atgggcctccagttcttgacccccatgcaaaactgttaca

SEQ ID NO: 14586 - RNA, 31 nt, synthetic construct
  source 1..31: mol_type = other RNA
gtgatggtggtgagggtgggcgtccagttca

SEQ ID NO: 14587 - RNA, 31 nt, synthetic construct
  source 1..31: mol_type = other RNA
gtgatgaaagtgaggacaggcctccggttca

SEQ ID NO: 14588 - RNA, 31 nt, synthetic construct
  source 1..31: mol_type = other RNA
atggtgaggatgggcctccggttactgccgc

SEQ ID NO: 14589 - RNA, 31 nt, synthetic construct
  source 1..31: mol_type = other RNA
ggcctccagttcacgtcgcccatgcaggaac

SEQ ID NO: 14590 - RNA, 47 nt, synthetic construct
  source 1..47: mol_type = other RNA
atgggcctccggttctagagaaggcgaccatcgcaggaactgttaca

SEQ ID NO: 14591 - RNA, 31 nt, synthetic construct
  source 1..31: mol_type = other RNA
gtgaggatgggcctccggttcacgccgccca

SEQ ID NO: 14592 - RNA, 31 nt, synthetic construct
  source 1..31: mol_type = other RNA
atggtttggatgggtctccggttgatgccgc

SEQ ID NO: 14593 - RNA, 31 nt, synthetic construct
  source 1..31: mol_type = other RNA
atggtgagaatgggcatccagtttgtgccgc

SEQ ID NO: 14594 - RNA, 41 nt, synthetic construct
  source 1..41: mol_type = other RNA
gatggtgatgatgggcctccagttcatgtcgcccatgcagg

SEQ ID NO: 14595 - RNA, 41 nt, synthetic construct
  source 1..41: mol_type = other RNA
gaggatgggcctccagttcacgtcgcccatgcaggaactgt

SEQ ID NO: 14596 - RNA, 31 nt, synthetic construct
  source 1..31: mol_type = other RNA
gtgatgaaggtgaggatgggactccagttca

SEQ ID NO: 14597 - RNA, 31 nt, synthetic construct
  source 1..31: mol_type = other RNA
atggtgtttctgggcctccggttccggccgc

SEQ ID NO: 14598 - RNA, 31 nt, synthetic construct
  source 1..31: mol_type = other RNA
ggcctccggttccggccgcccatgcaggaac

SEQ ID NO: 14599 - RNA, 31 nt, synthetic construct
  source 1..31: mol_type = other RNA
atggtgaggccgggcctccggttcttgccgc

SEQ ID NO: 14600 - RNA, 31 nt, synthetic construct
  source 1..31: mol_type = other RNA
atggtaaggatgggcctgcggttcatgccgc

SEQ ID NO: 14601 - RNA, 31 nt, synthetic construct
  source 1..31: mol_type = other RNA
atggtgagaatgggcgtccagttcttgccgc

SEQ ID NO: 14602 - RNA, 31 nt, synthetic construct
  source 1..31: mol_type = other RNA
ggcctccggttgatgctacccatgcaggaac

SEQ ID NO: 14603 - RNA, 31 nt, synthetic construct
  source 1..31: mol_type = other RNA
gtgatgttggtgaggatgggcctccagttca

SEQ ID NO: 14604 - RNA, 31 nt, synthetic construct
  source 1..31: mol_type = other RNA
ggcctccagttcctgccgcctgtgcaggaac

SEQ ID NO: 14605 - RNA, 31 nt, synthetic construct
  source 1..31: mol_type = other RNA
atggtgaggatgggcctccagttaatgccgc

SEQ ID NO: 14606 - RNA, 41 nt, synthetic construct
  source 1..41: mol_type = other RNA
gaggatgggcctccagttcatgtcgcccatgaaggaactgt

SEQ ID NO: 14607 - RNA, 41 nt, synthetic construct
  source 1..41: mol_type = other RNA
gaggatggggctccggttcatgctggacatgcaggaactgt

SEQ ID NO: 14608 - RNA, 41 nt, synthetic construct
  source 1..41: mol_type = other RNA
gatggtgagaatgggccttcaggtcatggagcccatgcagg

SEQ ID NO: 14609 - RNA, 31 nt, synthetic construct
  source 1..31: mol_type = other RNA
atggttaggatggaactccggttcatgccgc

SEQ ID NO: 14610 - RNA, 41 nt, synthetic construct
  source 1..41: mol_type = other RNA
gaggatgggcccccggttcatgccggacatgcaggaactgt

SEQ ID NO: 14611 - RNA, 41 nt, synthetic construct
  source 1..41: mol_type = other RNA
gaggatgggcctccggttgctgccgcccatgcaggaactgt

SEQ ID NO: 14612 - RNA, 47 nt, synthetic construct
  source 1..47: mol_type = other RNA
atgggcctccggctctagagaagcagcccatcgcaggtactgttaca

SEQ ID NO: 14613 - RNA, 41 nt, synthetic construct
  source 1..41: mol_type = other RNA
gaggatgggcctccggttccggccgcccatgcaggaactgt

SEQ ID NO: 14614 - RNA, 31 nt, synthetic construct
  source 1..31: mol_type = other RNA
ggcctccagttaatgccgcccattcaggaac

SEQ ID NO: 14615 - RNA, 41 nt, synthetic construct
  source 1..41: mol_type = other RNA
gaggatgggcctccggttcacgccgcccatgaaggaactgt

SEQ ID NO: 14616 - RNA, 62 nt, synthetic construct
  source 1..62: mol_type = other RNA
atgggcctccggttctagagaagtcgcccacacaattctgcagcttgcaaggaactgttaca

SEQ ID NO: 14617 - RNA, 41 nt, synthetic construct
  source 1..41: mol_type = other RNA
atgggcctccggttcatgccactcatgcaggatctgttaca

SEQ ID NO: 14618 - RNA, 41 nt, synthetic construct
  source 1..41: mol_type = other RNA
gaggatgggcgtccggttcatgccactcatgcaggaactgt

SEQ ID NO: 14619 - RNA, 31 nt, synthetic construct
  source 1..31: mol_type = other RNA
gtgaggatgggcctccagttcatgccgccca

SEQ ID NO: 14620 - RNA, 31 nt, synthetic construct
  source 1..31: mol_type = other RNA
ggcctccagttcatgcagcccatgcaggaac

SEQ ID NO: 14621 - RNA, 35 nt, synthetic construct
  source 1..35: mol_type = other RNA
ggcctccggttcatgcagccgaccatgctaggaac

SEQ ID NO: 14622 - RNA, 31 nt, synthetic construct
  source 1..31: mol_type = other RNA
gtgaggatgggcctccggttcatatcgccca

SEQ ID NO: 14623 - RNA, 30 nt, synthetic construct
  source 1..30: mol_type = other RNA
gtgaggaggacctccggttcatgcagccca

SEQ ID NO: 14624 - RNA, 40 nt, synthetic construct
  source 1..40: mol_type = other RNA
gaggatgggcctccggttcgatgcgcccagccggaactgt

SEQ ID NO: 14625 - RNA, 39 nt, synthetic construct
  source 1..39: mol_type = other RNA
gaggatgggcccccggtttgcagcccatgcaggaactgt

SEQ ID NO: 14626 - RNA, 31 nt, synthetic construct
  source 1..31: mol_type = other RNA
atggtaaggatgggcctccggatcatgccgc

SEQ ID NO: 14627 - RNA, 31 nt, synthetic construct
  source 1..31: mol_type = other RNA
gtgatgatgctgaggatgggccttcggttca

SEQ ID NO: 14628 - RNA, 35 nt, synthetic construct
  source 1..35: mol_type = other RNA
gtgatgatggaccatgaggatggggctccggttca

SEQ ID NO: 14629 - RNA, 41 nt, synthetic construct
  source 1..41: mol_type = other RNA
ttccagtgtgaagatggtgaggatgggaatccggttcatgc

SEQ ID NO: 14630 - RNA, 31 nt, synthetic construct
  source 1..31: mol_type = other RNA
atggtgaggatgggcctccagttcctgccgc

SEQ ID NO: 14631 - RNA, 39 nt, synthetic construct
  source 1..39: mol_type = other RNA
gaggatgggcctccggttactgctgcccacaggaactgt

SEQ ID NO: 14632 - RNA, 31 nt, synthetic construct
  source 1..31: mol_type = other RNA
ggcctccggtttatgcaacccaagcgggaac

SEQ ID NO: 14633 - RNA, 31 nt, synthetic construct
  source 1..31: mol_type = other RNA
gtgaggatgggcctccggcttatggcgccca

SEQ ID NO: 14634 - RNA, 41 nt, synthetic construct
  source 1..41: mol_type = other RNA
gaggatgggcctccggttcttgccgcccgtgcaggaactgt

SEQ ID NO: 14635 - RNA, 41 nt, synthetic construct
  source 1..41: mol_type = other RNA
atgggcctccagttcatgccgccaatgcagtacctgttaca

SEQ ID NO: 14636 - RNA, 31 nt, synthetic construct
  source 1..31: mol_type = other RNA
ggcctccggttcaggccgcccatgcaggaac

SEQ ID NO: 14637 - RNA, 41 nt, synthetic construct
  source 1..41: mol_type = other RNA
gaggatgggcctccggttcaggccgcccatgcaggaactgt

SEQ ID NO: 14638 - RNA, 41 nt, synthetic construct
  source 1..41: mol_type = other RNA
gaggatgggcctccggattatgccgcccgtgcgggaactgt

SEQ ID NO: 14639 - RNA, 31 nt, synthetic construct
  source 1..31: mol_type = other RNA
ggcctccggttcatatcgcccatgtaggaac

SEQ ID NO: 14640 - RNA, 41 nt, synthetic construct
  source 1..41: mol_type = other RNA
tgtgatgatggtgaggttggattttcggttaatgccgccca

SEQ ID NO: 14641 - RNA, 31 nt, synthetic construct
  source 1..31: mol_type = other RNA
gtgagaatgggcatccagtttgtgccgccca

SEQ ID NO: 14642 - RNA, 41 nt, synthetic construct
  source 1..41: mol_type = other RNA
gaggatgggcctccggttaacgccgcccatgcgggaactgt

SEQ ID NO: 14643 - RNA, 31 nt, synthetic construct
  source 1..31: mol_type = other RNA
gtgaggatgggcctccggttcctgacgccca

SEQ ID NO: 14644 - RNA, 31 nt, synthetic construct
  source 1..31: mol_type = other RNA
atggtaaggatgggcctccggattatgccgc

SEQ ID NO: 14645 - RNA, 33 nt, synthetic construct
  source 1..33: mol_type = other RNA
atgggcctccggtcccatgcaggaactgttaca

SEQ ID NO: 14646 - RNA, 39 nt, synthetic construct
  source 1..39: mol_type = other RNA
atgggcctccggttgatgctgctcatgcagactgttaca

SEQ ID NO: 14647 - RNA, 42 nt, synthetic construct
  source 1..42: mol_type = other RNA
gaggatgggcctccggttcccgccgccccatggaggaactgt

SEQ ID NO: 14648 - RNA, 43 nt, synthetic construct
  source 1..43: mol_type = other RNA
tgtgatgatggtgaggaagtgcctcttcggttcatgccgccca

SEQ ID NO: 14649 - RNA, 37 nt, synthetic construct
  source 1..37: mol_type = other RNA
gaggatgggcctccggttcatgccatccaggaactgt

SEQ ID NO: 14650 - RNA, 31 nt, synthetic construct
  source 1..31: mol_type = other RNA
ggcctccggttgatgtcgaacatgcaggaac

SEQ ID NO: 14651 - RNA, 40 nt, synthetic construct
  source 1..40: mol_type = other RNA
ttccagtgtatgatggtaaggatgggtctcccgttcatgc

SEQ ID NO: 14652 - RNA, 60 nt, synthetic construct
  source 1..60: mol_type = other RNA
atgggcctccggaatcccaacatttatgtcgccccatgccggtggatcacgactgttaca

SEQ ID NO: 14653 - RNA, 31 nt, synthetic construct
  source 1..31: mol_type = other RNA
ggcctccggttcatgtcgcccatgcgggaac

SEQ ID NO: 14654 - RNA, 34 nt, synthetic construct
  source 1..34: mol_type = other RNA
aggatgggcatccggttcatgcagccgaccatgc

SEQ ID NO: 14655 - RNA, 31 nt, synthetic construct
  source 1..31: mol_type = other RNA
atggtgaggatgggtctccgctttatgccgc

SEQ ID NO: 14656 - RNA, 31 nt, synthetic construct
  source 1..31: mol_type = other RNA
atggtcaggatgggcctccggttcacgccgc

SEQ ID NO: 14657 - RNA, 41 nt, synthetic construct
  source 1..41: mol_type = other RNA
atgggcctccggttcatgtcgctcatgcaggaactgttaca

SEQ ID NO: 14658 - RNA, 31 nt, synthetic construct
  source 1..31: mol_type = other RNA
ggcctccagtcgatgtcgcctgtgcaggaac

SEQ ID NO: 14659 - RNA, 33 nt, synthetic construct
  source 1..33: mol_type = other RNA
ggcctccagtttatgccgcccatctcaaggaac

SEQ ID NO: 14660 - RNA, 31 nt, synthetic construct
  source 1..31: mol_type = other RNA
ggcctccggttctcgtcgcccatgcaggaac

SEQ ID NO: 14661 - RNA, 39 nt, synthetic construct
  source 1..39: mol_type = other RNA
atgggcctccggtttctgaagcccataagaactgttaca

SEQ ID NO: 14662 - RNA, 46 nt, synthetic construct
  source 1..46: mol_type = other RNA
ttccagtgtggaacatgataggtgagaatgggcatccagttcatgc

SEQ ID NO: 14663 - RNA, 34 nt, synthetic construct
  source 1..34: mol_type = other RNA
gtgaggatgggcatccggttcatgcagccgccca

SEQ ID NO: 14664 - RNA, 41 nt, synthetic construct
  source 1..41: mol_type = other RNA
gaggatgggcctgcggttcatgtagcccatgtaggaactgt

SEQ ID NO: 14665 - RNA, 37 nt, synthetic construct
  source 1..37: mol_type = other RNA
aggatgtgcctcttcggttcatgcaacccgcgcatgc

SEQ ID NO: 14666 - RNA, 41 nt, synthetic construct
  source 1..41: mol_type = other RNA
gaggatgggcgtccagttcttgacccccatgcaggaactgt

SEQ ID NO: 14667 - RNA, 31 nt, synthetic construct
  source 1..31: mol_type = other RNA
ggcctccggttcatgacgtccatgcaggaac

SEQ ID NO: 14668 - RNA, 41 nt, synthetic construct
  source 1..41: mol_type = other RNA
tgtgatgacggtgaggatgggcctccagtcgatgccgccca

SEQ ID NO: 14669 - RNA, 31 nt, synthetic construct
  source 1..31: mol_type = other RNA
gtgaggatgggcctccggttctcgtcgccca

SEQ ID NO: 14670 - RNA, 42 nt, synthetic construct
  source 1..42: mol_type = other RNA
ttccagtgtgtcgatggtgagaatgggccttcaggttcatgc

SEQ ID NO: 14671 - RNA, 31 nt, synthetic construct
  source 1..31: mol_type = other RNA
gtgaggatgggcctccgatttatgccgccca

SEQ ID NO: 14672 - RNA, 42 nt, synthetic construct
  source 1..42: mol_type = other RNA
gaggatgggtatccagttcatgctcgcccatgcaggaactgt

SEQ ID NO: 14673 - RNA, 31 nt, synthetic construct
  source 1..31: mol_type = other RNA
aggatgggcctccggttgctgccgcccatgc

SEQ ID NO: 14674 - RNA, 31 nt, synthetic construct
  source 1..31: mol_type = other RNA
ggcctccggtttatgccgccaatgcaggaac

SEQ ID NO: 14675 - RNA, 31 nt, synthetic construct
  source 1..31: mol_type = other RNA
atggtgaaggaggacctccggttcatgccgc

SEQ ID NO: 14676 - RNA, 41 nt, synthetic construct
  source 1..41: mol_type = other RNA
gaggatgggcctccggtttatgcaacccaagcgggaactgt

SEQ ID NO: 14677 - RNA, 31 nt, synthetic construct
  source 1..31: mol_type = other RNA
gtgatgatggttgggatgggcctccagttca

SEQ ID NO: 14678 - RNA, 41 nt, synthetic construct
  source 1..41: mol_type = other RNA
gaggatgggcctccggttcatgacgtccatgcaggaactgt

SEQ ID NO: 14679 - RNA, 41 nt, synthetic construct
  source 1..41: mol_type = other RNA
gaggatgggcctccggttctcgtcgcccatgcaggaactgt

SEQ ID NO: 14680 - RNA, 31 nt, synthetic construct
  source 1..31: mol_type = other RNA
gtgaggatgggcctccagttcatgacgccca

SEQ ID NO: 14681 - RNA, 31 nt, synthetic construct
  source 1..31: mol_type = other RNA
gtgaggatgggcctccagtttatgccgccca

SEQ ID NO: 14682 - RNA, 31 nt, synthetic construct
  source 1..31: mol_type = other RNA
gtgaggatgggcctccggttcgatgcgccca

SEQ ID NO: 14683 - RNA, 31 nt, synthetic construct
  source 1..31: mol_type = other RNA
aggatgggcctccggttcatgctgcccatgc

SEQ ID NO: 14684 - RNA, 31 nt, synthetic construct
  source 1..31: mol_type = other RNA
gtgaggatgggcctccggattatgccgccca

SEQ ID NO: 14685 - RNA, 31 nt, synthetic construct
  source 1..31: mol_type = other RNA
atggtgaggacgggcctccagttaatgccgc

SEQ ID NO: 14686 - RNA, 41 nt, synthetic construct
  source 1..41: mol_type = other RNA
gaggatgggcctccggttcacgtcggccaagcaggaactgt

SEQ ID NO: 14687 - RNA, 31 nt, synthetic construct
  source 1..31: mol_type = other RNA
ggcctccagttcatgccgccaatgcaggaac

SEQ ID NO: 14688 - RNA, 31 nt, synthetic construct
  source 1..31: mol_type = other RNA
ggcctccggttaacgccgcccatgcaggaac

SEQ ID NO: 14689 - RNA, 41 nt, synthetic construct
  source 1..41: mol_type = other RNA
gaggatgggcgtccggttcataccacccatgccggaactgt

SEQ ID NO: 14690 - RNA, 43 nt, synthetic construct
  source 1..43: mol_type = other RNA
atggtaaggatgggcctccggttccaaaaaaaaaaaatgccgc

SEQ ID NO: 14691 - RNA, 45 nt, synthetic construct
  source 1..45: mol_type = other RNA
aggatggctcccatccggaatcccaacatttatgtcgccccatgc

SEQ ID NO: 14692 - RNA, 31 nt, synthetic construct
  source 1..31: mol_type = other RNA
ggcctccagttcatgtcgcccatgaaggaac

SEQ ID NO: 14693 - RNA, 31 nt, synthetic construct
  source 1..31: mol_type = other RNA
gtgaggatgggcctccagttcacgccgccca

SEQ ID NO: 14694 - RNA, 33 nt, synthetic construct
  source 1..33: mol_type = other RNA
gatggtgacgatgggcccccggtcccatgcagg

SEQ ID NO: 14695 - RNA, 41 nt, synthetic construct
  source 1..41: mol_type = other RNA
gaggatgggcctccggttcatatcgcccatgtaggaactgt

SEQ ID NO: 14696 - RNA, 31 nt, synthetic construct
  source 1..31: mol_type = other RNA
gtgatgatggagagaatgggcgtccagttca

SEQ ID NO: 14697 - RNA, 31 nt, synthetic construct
  source 1..31: mol_type = other RNA
atggtgaggaagggcctccggtttatgccgc

SEQ ID NO: 14698 - RNA, 41 nt, synthetic construct
  source 1..41: mol_type = other RNA
gaggatgggcctccggttcaagccgcctgtgcaggaactgt

SEQ ID NO: 14699 - RNA, 33 nt, synthetic construct
  source 1..33: mol_type = other RNA
ggcctccagttcacgccgccaccatgcaggaac

SEQ ID NO: 14700 - RNA, 31 nt, synthetic construct
  source 1..31: mol_type = other RNA
gtgaggatgggcctccggttgctgccgccca

SEQ ID NO: 14701 - RNA, 36 nt, synthetic construct
  source 1..36: mol_type = other RNA
gtgaggatgggcttccggctctagagaagcagccca

SEQ ID NO: 14702 - RNA, 31 nt, synthetic construct
  source 1..31: mol_type = other RNA
gtgaggatgggcctccggcacatgttgccca

SEQ ID NO: 14703 - RNA, 31 nt, synthetic construct
  source 1..31: mol_type = other RNA
gtgatgatggtgaggacatgcctccagttca

SEQ ID NO: 14704 - RNA, 31 nt, synthetic construct
  source 1..31: mol_type = other RNA
gtgaggatgggcctccggttaatcacgccca

SEQ ID NO: 14705 - RNA, 41 nt, synthetic construct
  source 1..41: mol_type = other RNA
gaggatgggcctccggtttatcgcgccggtgcgggaactgt

SEQ ID NO: 14706 - RNA, 39 nt, synthetic construct
  source 1..39: mol_type = other RNA
atgggcctccggttactgctgcccacagaaactgttaca

SEQ ID NO: 14707 - RNA, 43 nt, synthetic construct
  source 1..43: mol_type = other RNA
atgggcctccagttcctgcagcccatctcaaggaactgttaca

SEQ ID NO: 14708 - RNA, 30 nt, synthetic construct
  source 1..30: mol_type = other RNA
gtgatatggtgaggatgggcctccagttca

SEQ ID NO: 14709 - RNA, 41 nt, synthetic construct
  source 1..41: mol_type = other RNA
tgtgatgatggtgagaatgggccttcaggtcatgccgccca

SEQ ID NO: 14710 - RNA, 40 nt, synthetic construct
  source 1..40: mol_type = other RNA
atgggcctccggttactgatgcctgtgcagaactgttaca

SEQ ID NO: 14711 - RNA, 31 nt, synthetic construct
  source 1..31: mol_type = other RNA
gtgaggatgggcctccagttcctgccgccca

SEQ ID NO: 14712 - RNA, 47 nt, synthetic construct
  source 1..47: mol_type = other RNA
atgggcctccggttcatgctcgtccatcaaaccagggaactgttaca

SEQ ID NO: 14713 - RNA, 31 nt, synthetic construct
  source 1..31: mol_type = other RNA
ggccttcggttaataccgcctgtgcaggaac

SEQ ID NO: 14714 - RNA, 31 nt, synthetic construct
  source 1..31: mol_type = other RNA
ggcctccggttcatgctggacatgcaggaac

SEQ ID NO: 14715 - RNA, 41 nt, synthetic construct
  source 1..41: mol_type = other RNA
ttccagtgtgaagatggtgaaggtggtactccggttcatgc

SEQ ID NO: 14716 - RNA, 31 nt, synthetic construct
  source 1..31: mol_type = other RNA
ggcctccggttcatgccggacatgcaggaac

SEQ ID NO: 14717 - RNA, 43 nt, synthetic construct
  source 1..43: mol_type = other RNA
gtgaggatgggcctccggttccaaaaaaaaaaaatgccgccca

SEQ ID NO: 14718 - RNA, 41 nt, synthetic construct
  source 1..41: mol_type = other RNA
gaggatgggcctccggttcctgacgcccatcaaggaactgt

SEQ ID NO: 14719 - RNA, 23 nt, synthetic construct
  source 1..23: mol_type = other RNA
ggcctccggtcccatgcaggaac

SEQ ID NO: 14720 - RNA, 41 nt, synthetic construct
  source 1..41: mol_type = other RNA
gaggatgggctgccggttcatgccgtccatgcaggaactgt

SEQ ID NO: 14721 - RNA, 41 nt, synthetic construct
  source 1..41: mol_type = other RNA
atgggcctccgctttataacggaaatgcaggagctgttaca

SEQ ID NO: 14722 - RNA, 31 nt, synthetic construct
  source 1..31: mol_type = other RNA
gtgatactggtcaggatggaccttcggttca

SEQ ID NO: 14723 - RNA, 31 nt, synthetic construct
  source 1..31: mol_type = other RNA
ggcctccagttcttgacccccatgcaggaac

SEQ ID NO: 14724 - RNA, 38 nt, synthetic construct
  source 1..38: mol_type = other RNA
tgtgatgatggtgatgggcatccagtttatgccgccca

SEQ ID NO: 14725 - RNA, 31 nt, synthetic construct
  source 1..31: mol_type = other RNA
atggtgagaatgggcctccggttcatgccgc

SEQ ID NO: 14726 - RNA, 31 nt, synthetic construct
  source 1..31: mol_type = other RNA
ggcctccggttcatgccactcatgcaggaac

SEQ ID NO: 14727 - RNA, 43 nt, synthetic construct
  source 1..43: mol_type = other RNA
atgggcctccggttcctgacgcccatcaaagacaactgttaca

SEQ ID NO: 14728 - RNA, 31 nt, synthetic construct
  source 1..31: mol_type = other RNA
ggcctccagtccgtgccggccattccggaac

SEQ ID NO: 14729 - RNA, 41 nt, synthetic construct
  source 1..41: mol_type = other RNA
gaggatgggtctccggttgatgtcgaacatgcaggaactgt

SEQ ID NO: 14730 - RNA, 31 nt, synthetic construct
  source 1..31: mol_type = other RNA
ggcctccggttactgatgcctgtgcaggaac

SEQ ID NO: 14731 - RNA, 31 nt, synthetic construct
  source 1..31: mol_type = other RNA
gtgaggatgggcccccggttcttgccgccca

SEQ ID NO: 14732 - RNA, 31 nt, synthetic construct
  source 1..31: mol_type = other RNA
gtgaggatgggcctccggttcataccgccca

SEQ ID NO: 14733 - RNA, 31 nt, synthetic construct
  source 1..31: mol_type = other RNA
gtgaggatgggcctccggttaacgccgccca

SEQ ID NO: 14734 - RNA, 31 nt, synthetic construct
  source 1..31: mol_type = other RNA
gtgaggatggggctccggttaacgccgccca

SEQ ID NO: 14735 - RNA, 30 nt, synthetic construct
  source 1..30: mol_type = other RNA
gtgatggtggtgaagatggcctccagttca

SEQ ID NO: 14736 - RNA, 35 nt, synthetic construct
  source 1..35: mol_type = other RNA
aggataggcctccggttcatgcaaaaagcccatgc

SEQ ID NO: 14737 - RNA, 31 nt, synthetic construct
  source 1..31: mol_type = other RNA
ggcctccagttcatgacgccactgcaggaac

SEQ ID NO: 14738 - RNA, 41 nt, synthetic construct
  source 1..41: mol_type = other RNA
gaggatgggcctccagttaatgccgcccattcaggaactgt

SEQ ID NO: 14739 - RNA, 39 nt, synthetic construct
  source 1..39: mol_type = other RNA
atgggcctccggttcgtgaagcccatgggagctgttaca

SEQ ID NO: 14740 - RNA, 32 nt, synthetic construct
  source 1..32: mol_type = other RNA
ggcctccagttcatgctcgcccatgcaggaac

SEQ ID NO: 14741 - RNA, 42 nt, synthetic construct
  source 1..42: mol_type = other RNA
gaggatgggcatccggtttgtgctcgccaatacaggaactgt

SEQ ID NO: 14742 - RNA, 31 nt, synthetic construct
  source 1..31: mol_type = other RNA
ggcctccggttcatgccgccaatgcaggaac

SEQ ID NO: 14743 - RNA, 31 nt, synthetic construct
  source 1..31: mol_type = other RNA
gtgagtataggcctccggttcacgtcgccca

SEQ ID NO: 14744 - RNA, 47 nt, synthetic construct
  source 1..47: mol_type = other RNA
gaggatgggcctccggttcatgctcgtccatcaaaccagggaactgt

SEQ ID NO: 14745 - RNA, 37 nt, synthetic construct
  source 1..37: mol_type = other RNA
ggcctccggttctagagaaggcgaccatcgcaggaac

SEQ ID NO: 14746 - RNA, 50 nt, synthetic construct
  source 1..50: mol_type = other RNA
gatggtgaggatgggcattcagttcatggatctagacaacgtcatgcagg

SEQ ID NO: 14747 - RNA, 33 nt, synthetic construct
  source 1..33: mol_type = other RNA
ggcctccagttcctgcagcccatctcaaggaac

SEQ ID NO: 14748 - RNA, 41 nt, synthetic construct
  source 1..41: mol_type = other RNA
gaggatgggcctccggttcctgtcgcccatgcaggaactgt

SEQ ID NO: 14749 - RNA, 41 nt, synthetic construct
  source 1..41: mol_type = other RNA
atgggcctcccgttggtgccgaccatgcaggaactgttaca

SEQ ID NO: 14750 - RNA, 31 nt, synthetic construct
  source 1..31: mol_type = other RNA
gtgaggatggaactccggttcatgtcgccca

SEQ ID NO: 14751 - RNA, 41 nt, synthetic construct
  source 1..41: mol_type = other RNA
atgggcctccggttcacgccgcccatgaaggcactgttaca

SEQ ID NO: 14752 - RNA, 41 nt, synthetic construct
  source 1..41: mol_type = other RNA
gaggatggggctccggtttatgccgcccctacgggaactgt

SEQ ID NO: 14753 - RNA, 41 nt, synthetic construct
  source 1..41: mol_type = other RNA
gaggatgggcctccagtttatgccgcccatgcaggaactgt

SEQ ID NO: 14754 - RNA, 31 nt, synthetic construct
  source 1..31: mol_type = other RNA
aggatgggcctccagttcctgccgcccatgc

SEQ ID NO: 14755 - RNA, 44 nt, synthetic construct
  source 1..44: mol_type = other RNA
atgggcctccggttcatgccgtccatgcaggaaccactgttaca

SEQ ID NO: 14756 - RNA, 31 nt, synthetic construct
  source 1..31: mol_type = other RNA
ggcctccggttgctgccgcccatgcaggaac

SEQ ID NO: 14757 - RNA, 31 nt, synthetic construct
  source 1..31: mol_type = other RNA
gtgatgatggttaggatgggtctcccgttca

SEQ ID NO: 14758 - RNA, 41 nt, synthetic construct
  source 1..41: mol_type = other RNA
gaggatgggcctccggttactgatgcctgtgcaggaactgt

SEQ ID NO: 14759 - RNA, 31 nt, synthetic construct
  source 1..31: mol_type = other RNA
gtgatgatggtgaggttggattttcggttca

SEQ ID NO: 14760 - RNA, 31 nt, synthetic construct
  source 1..31: mol_type = other RNA
ggcctccagtttgtgccgcccatgtaggaac

SEQ ID NO: 14761 - RNA, 32 nt, synthetic construct
  source 1..32: mol_type = other RNA
gtgataaatggtgaggatgggtctccggttca

SEQ ID NO: 14762 - RNA, 31 nt, synthetic construct
  source 1..31: mol_type = other RNA
ggcctccggttcctgtcgcccatgcaggaac

SEQ ID NO: 14763 - RNA, 41 nt, synthetic construct
  source 1..41: mol_type = other RNA
gaggatgggcctccggttcgtgccgcccatgctggaactgt

SEQ ID NO: 14764 - RNA, 32 nt, synthetic construct
  source 1..32: mol_type = other RNA
gtgatgataggtgagaatgggcatccagttca

SEQ ID NO: 14765 - RNA, 41 nt, synthetic construct
  source 1..41: mol_type = other RNA
gaggatgggcctgcggttcatgtagcccaagtaggaactgt

SEQ ID NO: 14766 - RNA, 46 nt, synthetic construct
  source 1..46: mol_type = other RNA
gaggatgggcttccggttctagagaagtagcccatgctggaactgt

SEQ ID NO: 14767 - RNA, 31 nt, synthetic construct
  source 1..31: mol_type = other RNA
gtgagtctgggcctccggttccggccgccca

SEQ ID NO: 14768 - RNA, 31 nt, synthetic construct
  source 1..31: mol_type = other RNA
gtgaggctgggcctccggttcaggccgccca

SEQ ID NO: 14769 - RNA, 41 nt, synthetic construct
  source 1..41: mol_type = other RNA
gaggatgggcctccaatttatgccgtccatggaggaactgt

SEQ ID NO: 14770 - RNA, 31 nt, synthetic construct
  source 1..31: mol_type = other RNA
gtgagcattggcccccggttcatgccgccca

SEQ ID NO: 14771 - RNA, 41 nt, synthetic construct
  source 1..41: mol_type = other RNA
gaggatggtcctccggtccatgatgcccgtggaggaactgt

SEQ ID NO: 14772 - RNA, 31 nt, synthetic construct
  source 1..31: mol_type = other RNA
aggatgggcctccggttcatgacgtccatgc

SEQ ID NO: 14773 - RNA, 41 nt, synthetic construct
  source 1..41: mol_type = other RNA
gaggatgggcctccagtcgatgtcgcctgtgcaggaactgt

SEQ ID NO: 14774 - RNA, 46 nt, synthetic construct
  source 1..46: mol_type = other RNA
gaggatgggcctccggttcatgcaaaaagcctattgtgggaactgt

SEQ ID NO: 14775 - RNA, 31 nt, synthetic construct
  source 1..31: mol_type = other RNA
gtgaggatgggcctccagttcctgcagccca

SEQ ID NO: 14776 - RNA, 31 nt, synthetic construct
  source 1..31: mol_type = other RNA
ggcctccggttaatcacgaagatgcaggaac

SEQ ID NO: 14777 - RNA, 29 nt, synthetic construct
  source 1..29: mol_type = other RNA
ggcctccggttactgctgcccacaggaac

SEQ ID NO: 14778 - RNA, 29 nt, synthetic construct
  source 1..29: mol_type = other RNA
gtgaggataggcccccggtttgcagccca

SEQ ID NO: 14779 - RNA, 31 nt, synthetic construct
  source 1..31: mol_type = other RNA
gtgaggacggggctccggttcatgctgccca

SEQ ID NO: 14780 - RNA, 32 nt, synthetic construct
  source 1..32: mol_type = other RNA
ggcctccggttcccgccgccccatggaggaac

SEQ ID NO: 14781 - RNA, 41 nt, synthetic construct
  source 1..41: mol_type = other RNA
atgggccttcggttaataccgcctgtgcaggatctgttaca

SEQ ID NO: 14782 - RNA, 31 nt, synthetic construct
  source 1..31: mol_type = other RNA
ggcctccgcttcatgtcgcccatgcgggaac

SEQ ID NO: 14783 - RNA, 31 nt, synthetic construct
  source 1..31: mol_type = other RNA
ggcctgcggttcatgtagcccatgtaggaac

SEQ ID NO: 14784 - RNA, 43 nt, synthetic construct
  source 1..43: mol_type = other RNA
ttccagtgtgatgctggtgaggaagtgcctcttcggttcatgc

SEQ ID NO: 14785 - RNA, 54 nt, synthetic construct
  source 1..54: mol_type = other RNA
gtgatgatgccgggataaattgggctttcaaatagactcctcttcatgggttca

SEQ ID NO: 14786 - RNA, 41 nt, synthetic construct
  source 1..41: mol_type = other RNA
gaggatgggcctccgatttatgccgcccgtgcaggaactgt

SEQ ID NO: 14787 - RNA, 31 nt, synthetic construct
  source 1..31: mol_type = other RNA
gtgaggatgggcctgcggttcatgtagccca

SEQ ID NO: 14788 - RNA, 31 nt, synthetic construct
  source 1..31: mol_type = other RNA
aggatgggcctgcggttcatgtagcccatgc

SEQ ID NO: 14789 - RNA, 37 nt, synthetic construct
  source 1..37: mol_type = other RNA
ggcctccggctctagagaagcagcccatcgcaggaac

SEQ ID NO: 14790 - RNA, 31 nt, synthetic construct
  source 1..31: mol_type = other RNA
atggtgaggatgggcattcagttcatgccgc

SEQ ID NO: 14791 - RNA, 31 nt, synthetic construct
  source 1..31: mol_type = other RNA
aggatgggcctccggttcctgtcgcccatgc

SEQ ID NO: 14792 - RNA, 31 nt, synthetic construct
  source 1..31: mol_type = other RNA
atggtgaggatgagcctccaatttatgccgc

SEQ ID NO: 14793 - RNA, 31 nt, synthetic construct
  source 1..31: mol_type = other RNA
atggtgaagatgggcctccagttcctgccgc

SEQ ID NO: 14794 - RNA, 31 nt, synthetic construct
  source 1..31: mol_type = other RNA
gtgagggtgagcctccggtttctgaagccca

SEQ ID NO: 14795 - RNA, 31 nt, synthetic construct
  source 1..31: mol_type = other RNA
atggtggggatgtgtctccagttcatgccgc

SEQ ID NO: 14796 - RNA, 32 nt, synthetic construct
  source 1..32: mol_type = other RNA
gtgagggggggcatccggtttgtgctcgccca

SEQ ID NO: 14797 - RNA, 29 nt, synthetic construct
  source 1..29: mol_type = other RNA
aggataggcccccggtttgcagcccatgc

SEQ ID NO: 14798 - RNA, 41 nt, synthetic construct
  source 1..41: mol_type = other RNA
gaggatggaactccggttcatgtcgcccatgcgggaactgt

SEQ ID NO: 14799 - RNA, 31 nt, synthetic construct
  source 1..31: mol_type = other RNA
ggcctccggtttatgccgcccctacgggaac

SEQ ID NO: 14800 - RNA, 28 nt, synthetic construct
  source 1..28: mol_type = other RNA
gtgatgatggtgatgggcatccagttca

SEQ ID NO: 14801 - RNA, 37 nt, synthetic construct
  source 1..37: mol_type = other RNA
atgggcctccggttcgatgcgcccagccactgttaca

SEQ ID NO: 14802 - RNA, 32 nt, synthetic construct
  source 1..32: mol_type = other RNA
aggatgggcatccggtttgtgctcgcccatgc

SEQ ID NO: 14803 - RNA, 41 nt, synthetic construct
  source 1..41: mol_type = other RNA
gaggatgggtatccggttcatgccgcccatgtaggaactgt

SEQ ID NO: 14804 - RNA, 31 nt, synthetic construct
  source 1..31: mol_type = other RNA
atggttgggatgggcctccagttcacgccgc

SEQ ID NO: 14805 - RNA, 43 nt, synthetic construct
  source 1..43: mol_type = other RNA
atgggccttcggttcatgccgcccaacgccaccaactgttaca

SEQ ID NO: 14806 - RNA, 41 nt, synthetic construct
  source 1..41: mol_type = other RNA
atgggccttcaggtcatggagcccatgccggaactgttaca

SEQ ID NO: 14807 - RNA, 27 nt, synthetic construct
  source 1..27: mol_type = other RNA
atggtgacgatgggcccccggtgccgc

SEQ ID NO: 14808 - RNA, 41 nt, synthetic construct
  source 1..41: mol_type = other RNA
gaggatgggtctccggtaaatgctgccaatgcaggaactgt

SEQ ID NO: 14809 - RNA, 31 nt, synthetic construct
  source 1..31: mol_type = other RNA
gtgatgctggtgaggatgggcctacggttca

SEQ ID NO: 14810 - RNA, 36 nt, synthetic construct
  source 1..36: mol_type = other RNA
aggattggcttccggttctagagaaggcgaccatgc

SEQ ID NO: 14811 - RNA, 41 nt, synthetic construct
  source 1..41: mol_type = other RNA
gaggatgggcctccagttcatgacgccactgcaggaactgt

SEQ ID NO: 14812 - RNA, 41 nt, synthetic construct
  source 1..41: mol_type = other RNA
gaggatgggcctccagttaataccgcccactcaggaactgt

SEQ ID NO: 14813 - RNA, 41 nt, synthetic construct
  source 1..41: mol_type = other RNA
atgggcctacggttcatgccgccaatgcaggaactgttaca

SEQ ID NO: 14814 - RNA, 31 nt, synthetic construct
  source 1..31: mol_type = other RNA
ggcctccggttcatgccgtccatgcaggaac

SEQ ID NO: 14815 - RNA, 31 nt, synthetic construct
  source 1..31: mol_type = other RNA
gtgatgacggtgctgaggggcctccagttca

SEQ ID NO: 14816 - RNA, 31 nt, synthetic construct
  source 1..31: mol_type = other RNA
gtgaggatgggtatccggttcatgccgccca

SEQ ID NO: 14817 - RNA, 41 nt, synthetic construct
  source 1..41: mol_type = other RNA
gaggatgggcctccggttcacgtcgccccagcaggaactgt

SEQ ID NO: 14818 - RNA, 31 nt, synthetic construct
  source 1..31: mol_type = other RNA
gtgaggttggtcctccggtccatgatgccca

SEQ ID NO: 14819 - RNA, 31 nt, synthetic construct
  source 1..31: mol_type = other RNA
atggtgaggatggccctccggttcatgccgc

SEQ ID NO: 14820 - RNA, 54 nt, synthetic construct
  source 1..54: mol_type = other RNA
atgggcctccggtcttaaattcctagtcatgacgcctatgccataactgttaca

SEQ ID NO: 14821 - RNA, 36 nt, synthetic construct
  source 1..36: mol_type = other RNA
aggatcggcttccggttctagagaagtcgcccatgc

SEQ ID NO: 14822 - RNA, 46 nt, synthetic construct
  source 1..46: mol_type = other RNA
gaggatggacttccggttctaaagaagtcgcccatgctggaactgt

SEQ ID NO: 14823 - RNA, 31 nt, synthetic construct
  source 1..31: mol_type = other RNA
gtgatgataatgaaggaggacctccggttca

SEQ ID NO: 14824 - RNA, 33 nt, synthetic construct
  source 1..33: mol_type = other RNA
aggatggacctccggttcatgcaaagcccatgc

SEQ ID NO: 14825 - RNA, 31 nt, synthetic construct
  source 1..31: mol_type = other RNA
gtgaggacaggcctccggttcatgcagccca

SEQ ID NO: 14826 - RNA, 31 nt, synthetic construct
  source 1..31: mol_type = other RNA
gtgatgatggtgaggatgggcattcagttca

SEQ ID NO: 14827 - RNA, 43 nt, synthetic construct
  source 1..43: mol_type = other RNA
atgggcctccagtttatgccgcccatctcaaggaactgttaca

SEQ ID NO: 14828 - RNA, 27 nt, synthetic construct
  source 1..27: mol_type = other RNA
aggatgagcctccggttcatgccatgc

SEQ ID NO: 14829 - RNA, 43 nt, synthetic construct
  source 1..43: mol_type = other RNA
atgggcctacgttcacggatggcgcatgctaggaactgttaca

SEQ ID NO: 14830 - RNA, 40 nt, synthetic construct
  source 1..40: mol_type = other RNA
gatggtgaggatgtctacgttcacggatggcgcatgcagg

SEQ ID NO: 14831 - RNA, 31 nt, synthetic construct
  source 1..31: mol_type = other RNA
ggcctccaatttatgccgtccatggaggaac

SEQ ID NO: 14832 - RNA, 41 nt, synthetic construct
  source 1..41: mol_type = other RNA
gaggatgggcctccggttcatgctgcccatgcaggaactgt

SEQ ID NO: 14833 - RNA, 30 nt, synthetic construct
  source 1..30: mol_type = other RNA
ggcctccggtttctgaagcccataaggaac

SEQ ID NO: 14834 - RNA, 32 nt, synthetic construct
  source 1..32: mol_type = other RNA
gtgagggtgggtatccagttcatgctcgccca

SEQ ID NO: 14835 - RNA, 31 nt, synthetic construct
  source 1..31: mol_type = other RNA
gtgaggatggacctccagttcatgccgccca

SEQ ID NO: 14836 - RNA, 48 nt, synthetic construct
  source 1..48: mol_type = other RNA
gtgatgttcttcattacaatatggtgacgatggctcccatccggttca

SEQ ID NO: 14837 - RNA, 37 nt, synthetic construct
  source 1..37: mol_type = other RNA
ggcctccggttcatgctcgtccatcaaaccagggaac

SEQ ID NO: 14838 - RNA, 31 nt, synthetic construct
  source 1..31: mol_type = other RNA
aggatgggcctccggttcttgccgcccatgc

SEQ ID NO: 14839 - RNA, 31 nt, synthetic construct
  source 1..31: mol_type = other RNA
gtgataatcgttaggatggaactccggttca

SEQ ID NO: 14840 - RNA, 31 nt, synthetic construct
  source 1..31: mol_type = other RNA
gtgagaaggggcctccggttcacgtcgccca

SEQ ID NO: 14841 - RNA, 31 nt, synthetic construct
  source 1..31: mol_type = other RNA
ggcctgcggttcatgtagcccaagtaggaac

SEQ ID NO: 14842 - RNA, 31 nt, synthetic construct
  source 1..31: mol_type = other RNA
atggtaaggatgggactgcagttcatgccgc

SEQ ID NO: 14843 - RNA, 31 nt, synthetic construct
  source 1..31: mol_type = other RNA
gtgaggatgggactgcagttcatgtggccca

SEQ ID NO: 14844 - RNA, 31 nt, synthetic construct
  source 1..31: mol_type = other RNA
aggatggggctccggttcatgctggacatgc

SEQ ID NO: 14845 - RNA, 31 nt, synthetic construct
  source 1..31: mol_type = other RNA
atggtgaggatgggccttcggttcatgccgc

SEQ ID NO: 14846 - RNA, 41 nt, synthetic construct
  source 1..41: mol_type = other RNA
gaggatgggccttcggttcatgccgcccaacgcggaactgt

SEQ ID NO: 14847 - RNA, 31 nt, synthetic construct
  source 1..31: mol_type = other RNA
gtgagggtgggcgtccggttcatgccgccca

SEQ ID NO: 14848 - RNA, 41 nt, synthetic construct
  source 1..41: mol_type = other RNA
ttccagtgggatgatggtgaggatgggcctccggttcatgc

SEQ ID NO: 14849 - RNA, 36 nt, synthetic construct
  source 1..36: mol_type = other RNA
gtgaggattggcttccggttctagagaaggcgccca

SEQ ID NO: 14850 - RNA, 36 nt, synthetic construct
  source 1..36: mol_type = other RNA
gtgaggatgggcttccggttctagagaagtagccca

SEQ ID NO: 14851 - RNA, 31 nt, synthetic construct
  source 1..31: mol_type = other RNA
ggcctccggcacatgttgcccgtactggaac

SEQ ID NO: 14852 - RNA, 28 nt, synthetic construct
  source 1..28: mol_type = other RNA
atggtgatgggcatccagtttatgccgc

SEQ ID NO: 14853 - RNA, 31 nt, synthetic construct
  source 1..31: mol_type = other RNA
gtgaggatgggtctccagttcatgccgccca

SEQ ID NO: 14854 - RNA, 33 nt, synthetic construct
  source 1..33: mol_type = other RNA
ggcctacgttcacggatggcgcatgctaggaac

SEQ ID NO: 14855 - RNA, 31 nt, synthetic construct
  source 1..31: mol_type = other RNA
gtgaggatgggtctccggttgatgtcgccca

SEQ ID NO: 14856 - RNA, 30 nt, synthetic construct
  source 1..30: mol_type = other RNA
ggcctccggttcgatgcgcccagccggaac

SEQ ID NO: 14857 - RNA, 30 nt, synthetic construct
  source 1..30: mol_type = other RNA
gtgatgatggtgagatggacctccagttca

SEQ ID NO: 14858 - RNA, 31 nt, synthetic construct
  source 1..31: mol_type = other RNA
aggatgggcctccagttcacgtcgcccatgc

SEQ ID NO: 14859 - RNA, 43 nt, synthetic construct
  source 1..43: mol_type = other RNA
gaggatgggcctccagttcacgccgccaccatgcaggaactgt

SEQ ID NO: 14860 - RNA, 31 nt, synthetic construct
  source 1..31: mol_type = other RNA
gtgatgcacgtcaggacgggcctccggttca

SEQ ID NO: 14861 - RNA, 41 nt, synthetic construct
  source 1..41: mol_type = other RNA
gaggatgggccgccggttcatgtcgctcatgcaggaactgt

SEQ ID NO: 14862 - RNA, 31 nt, synthetic construct
  source 1..31: mol_type = other RNA
gtgatgaaggtggtactggggcttcggttca

SEQ ID NO: 14863 - RNA, 31 nt, synthetic construct
  source 1..31: mol_type = other RNA
gtgagggtgggcgtccggttcataccgccca

SEQ ID NO: 14864 - RNA, 43 nt, synthetic construct
  source 1..43: mol_type = other RNA
gaggatgggcctccagttcctgcagcccatctcaaggaactgt

SEQ ID NO: 14865 - RNA, 31 nt, synthetic construct
  source 1..31: mol_type = other RNA
aggatgggcctccagttcctgcagcccatgc

SEQ ID NO: 14866 - RNA, 31 nt, synthetic construct
  source 1..31: mol_type = other RNA
gtgatgcctgtgaagatgagcctccagttca

SEQ ID NO: 14867 - RNA, 31 nt, synthetic construct
  source 1..31: mol_type = other RNA
atggtaaggatgggtctcccgttggtgccgc

SEQ ID NO: 14868 - RNA, 31 nt, synthetic construct
  source 1..31: mol_type = other RNA
ggcctcccgttggtgccgaccatgcaggaac

SEQ ID NO: 14869 - RNA, 39 nt, synthetic construct
  source 1..39: mol_type = other RNA
gaggatgggcctccggttcgtgaagcccatgggaactgt

SEQ ID NO: 14870 - RNA, 31 nt, synthetic construct
  source 1..31: mol_type = other RNA
ggcctccggtaaatgctgccaatgcaggaac

SEQ ID NO: 14871 - RNA, 31 nt, synthetic construct
  source 1..31: mol_type = other RNA
gtgaggatgggcctacggttcatgccgccca

SEQ ID NO: 14872 - RNA, 45 nt, synthetic construct
  source 1..45: mol_type = other RNA
gaggatgggcatccggttcatgcagccgaccatgctaggaactgt

SEQ ID NO: 14873 - RNA, 31 nt, synthetic construct
  source 1..31: mol_type = other RNA
ggcctccggttcacgtcgccccagcaggaac

SEQ ID NO: 14874 - RNA, 31 nt, synthetic construct
  source 1..31: mol_type = other RNA
gtgaggacgggcctccggttcccgccgccca

SEQ ID NO: 14875 - RNA, 30 nt, synthetic construct
  source 1..30: mol_type = other RNA
atggtcaggatggaccttcggttcagccgc

SEQ ID NO: 14876 - RNA, 40 nt, synthetic construct
  source 1..40: mol_type = other RNA
atgggccttcggttcagccgcgcatcaaggcactgttaca

SEQ ID NO: 14877 - RNA, 43 nt, synthetic construct
  source 1..43: mol_type = other RNA
atgggccttcggttagccgcccttatgcagatgaactgttaca

SEQ ID NO: 14878 - RNA, 31 nt, synthetic construct
  source 1..31: mol_type = other RNA
ggccttcggttagccgcccttatgcaggaac

SEQ ID NO: 14879 - RNA, 31 nt, synthetic construct
  source 1..31: mol_type = other RNA
aggatgggcctccagttcatgccgcccatgc

SEQ ID NO: 14880 - RNA, 31 nt, synthetic construct
  source 1..31: mol_type = other RNA
gtgaggatgggactccagttcatggagccca

SEQ ID NO: 14881 - RNA, 31 nt, synthetic construct
  source 1..31: mol_type = other RNA
ggcctccagttaataccgcccactcaggaac

SEQ ID NO: 14882 - RNA, 24 nt, synthetic construct
  source 1..24: mol_type = other RNA
gtgaggatgggcccccggtgccca

SEQ ID NO: 14883 - RNA, 31 nt, synthetic construct
  source 1..31: mol_type = other RNA
gtgaggataggcctccggttcaagccgccca

SEQ ID NO: 14884 - RNA, 31 nt, synthetic construct
  source 1..31: mol_type = other RNA
gtgagggtgggcctgcggttcatgtagccca

SEQ ID NO: 14885 - RNA, 31 nt, synthetic construct
  source 1..31: mol_type = other RNA
gtgatgatggtaaggatgggactgcagttca

SEQ ID NO: 14886 - RNA, 31 nt, synthetic construct
  source 1..31: mol_type = other RNA
gtgagggtgggcgtccagttcatgccgccca

SEQ ID NO: 14887 - RNA, 62 nt, synthetic construct
  source 1..62: mol_type = other RNA
ttccagtgtggatgccgggataaattgggctttcaaatagactcctcttcatgggttcatgc

SEQ ID NO: 14888 - RNA, 36 nt, synthetic construct
  source 1..36: mol_type = other RNA
gtgaggatcggcttccggttctagagaagtcgccca

SEQ ID NO: 14889 - RNA, 36 nt, synthetic construct
  source 1..36: mol_type = other RNA
ggcctccggttctaaagaagtcgcccatgctggaac

SEQ ID NO: 14890 - RNA, 31 nt, synthetic construct
  source 1..31: mol_type = other RNA
ggccttcaggtcatggagcccatgccggaac

SEQ ID NO: 14891 - RNA, 31 nt, synthetic construct
  source 1..31: mol_type = other RNA
gtgaggataggctgccggttcatgccgccca

SEQ ID NO: 14892 - RNA, 31 nt, synthetic construct
  source 1..31: mol_type = other RNA
ggcctccggttcatgccgcccatgtaggaac

SEQ ID NO: 14893 - RNA, 31 nt, synthetic construct
  source 1..31: mol_type = other RNA
aggatgggcctccggttcacgccgcccatgc

SEQ ID NO: 14894 - RNA, 31 nt, synthetic construct
  source 1..31: mol_type = other RNA
aggatgggcctccggttgatgctacccatgc

SEQ ID NO: 14895 - RNA, 31 nt, synthetic construct
  source 1..31: mol_type = other RNA
ggcctccggttcatgctgcccatgcaggaac

SEQ ID NO: 14896 - RNA, 31 nt, synthetic construct
  source 1..31: mol_type = other RNA
aggatgagcctccggtttctgaagcccatgc

SEQ ID NO: 14897 - RNA, 41 nt, synthetic construct
  source 1..41: mol_type = other RNA
gaggatgggcctccggcacatgttgcccgtactggaactgt

SEQ ID NO: 14898 - RNA, 31 nt, synthetic construct
  source 1..31: mol_type = other RNA
ggcctccggttaacgccgcccatgcgggaac

SEQ ID NO: 14899 - RNA, 41 nt, synthetic construct
  source 1..41: mol_type = other RNA
gtgaggatgggcattcagttcatggatctagacaacgccca

SEQ ID NO: 14900 - RNA, 31 nt, synthetic construct
  source 1..31: mol_type = other RNA
aggatgggcctccggttctcgtcgcccatgc

SEQ ID NO: 14901 - RNA, 32 nt, synthetic construct
  source 1..32: mol_type = other RNA
gtgatgatggtgagaatgggccttcaggttca

SEQ ID NO: 14902 - RNA, 31 nt, synthetic construct
  source 1..31: mol_type = other RNA
aggatgggcctccggttcatgccgcccatgc

SEQ ID NO: 14903 - RNA, 31 nt, synthetic construct
  source 1..31: mol_type = other RNA
gtgaggatgtgtctccagttcatgcagccca

SEQ ID NO: 14904 - RNA, 32 nt, synthetic construct
  source 1..32: mol_type = other RNA
ggcctccggtttgtgctcgccaatacaggaac

SEQ ID NO: 14905 - RNA, 31 nt, synthetic construct
  source 1..31: mol_type = other RNA
gtgaggatgggtctccggtaaatgctgccca

SEQ ID NO: 14906 - RNA, 31 nt, synthetic construct
  source 1..31: mol_type = other RNA
ggcctccggttcgtgccgcccatgctggaac

SEQ ID NO: 14907 - RNA, 31 nt, synthetic construct
  source 1..31: mol_type = other RNA
aggatgggcctccggttcgtgccgcccatgc

SEQ ID NO: 14908 - RNA, 37 nt, synthetic construct
  source 1..37: mol_type = other RNA
gtgaggaagtgcctcttcggttcatgcaacccgccca

SEQ ID NO: 14909 - RNA, 32 nt, synthetic construct
  source 1..32: mol_type = other RNA
gtgagaatgggcgtccagttcttgaccgccca

SEQ ID NO: 14910 - RNA, 31 nt, synthetic construct
  source 1..31: mol_type = other RNA
aggattgggctccggtttatgccgcccatgc

SEQ ID NO: 14911 - RNA, 40 nt, synthetic construct
  source 1..40: mol_type = other RNA
gaggatggggctccggttaacgccgcccatgaggaactgt

SEQ ID NO: 14912 - RNA, 31 nt, synthetic construct
  source 1..31: mol_type = other RNA
gtgaggatgggcctccagtcgatgtcgccca

SEQ ID NO: 14913 - RNA, 40 nt, synthetic construct
  source 1..40: mol_type = other RNA
aggatgggcattcagttcatggatctagacaacgtcatgc

SEQ ID NO: 14914 - RNA, 31 nt, synthetic construct
  source 1..31: mol_type = other RNA
aggatgggactccagttcatggagcccatgc

SEQ ID NO: 14915 - RNA, 31 nt, synthetic construct
  source 1..31: mol_type = other RNA
aggatgggcctccggttcctgacgcccatgc

SEQ ID NO: 14916 - RNA, 31 nt, synthetic construct
  source 1..31: mol_type = other RNA
aggatgggcctccagttcatgacgcccatgc

SEQ ID NO: 14917 - RNA, 40 nt, synthetic construct
  source 1..40: mol_type = other RNA
atgggcctccggtttatcgcgccggtgcgaccctgttaca

SEQ ID NO: 14918 - RNA, 31 nt, synthetic construct
  source 1..31: mol_type = other RNA
atggtgctgaggggcctccagttcacgccgc

SEQ ID NO: 14919 - RNA, 41 nt, synthetic construct
  source 1..41: mol_type = other RNA
gaggatggattttcggttaataccgcctgtgcaggaactgt

SEQ ID NO: 14920 - RNA, 40 nt, synthetic construct
  source 1..40: mol_type = other RNA
gaggatggaccttcggttcagccgcgcatcaaggaactgt

SEQ ID NO: 14921 - RNA, 47 nt, synthetic construct
  source 1..47: mol_type = other RNA
gatggtgaggaagtgcctcttcggttcatgcaacccgcgcatgcagg

SEQ ID NO: 14922 - RNA, 31 nt, synthetic construct
  source 1..31: mol_type = other RNA
aggatatgcctccagtccgtgccggccatgc

SEQ ID NO: 14923 - RNA, 39 nt, synthetic construct
  source 1..39: mol_type = other RNA
gaggatggccctccgatttatcgcccatgcgggaactgt

SEQ ID NO: 14924 - RNA, 29 nt, synthetic construct
  source 1..29: mol_type = other RNA
aggatggccctccgatttatcgcccatgc

SEQ ID NO: 14925 - RNA, 31 nt, synthetic construct
  source 1..31: mol_type = other RNA
aggatgggcctccggttcgtgaagcccatgc

SEQ ID NO: 14926 - RNA, 31 nt, synthetic construct
  source 1..31: mol_type = other RNA
ggcctccggttgatgctgctcatgcaggaac

SEQ ID NO: 14927 - RNA, 31 nt, synthetic construct
  source 1..31: mol_type = other RNA
ggcctacggttcatgccgccaatgcaggaac

SEQ ID NO: 14928 - RNA, 31 nt, synthetic construct
  source 1..31: mol_type = other RNA
gtgaggttgggcctccggttcgtgccgccca

SEQ ID NO: 14929 - RNA, 32 nt, synthetic construct
  source 1..32: mol_type = other RNA
aggatgggcctccggttcatgctcgtccatgc

SEQ ID NO: 14930 - RNA, 31 nt, synthetic construct
  source 1..31: mol_type = other RNA
gtgaggttggattttcggttaataccgccca

SEQ ID NO: 14931 - RNA, 31 nt, synthetic construct
  source 1..31: mol_type = other RNA
ggcctccggttcataccacccatgccggaac

SEQ ID NO: 14932 - RNA, 47 nt, synthetic construct
  source 1..47: mol_type = other RNA
gaggatgggcttccggttctagagaaggcgaccatcgcaggaactgt

SEQ ID NO: 14933 - RNA, 31 nt, synthetic construct
  source 1..31: mol_type = other RNA
aggatgggcctccggcacatgttgcccatgc

SEQ ID NO: 14934 - RNA, 40 nt, synthetic construct
  source 1..40: mol_type = other RNA
ggccttcagttcatggatctagacaacgtcgtgcgggaac

SEQ ID NO: 14935 - RNA, 31 nt, synthetic construct
  source 1..31: mol_type = other RNA
aggatgggcctccggttccggccgcccatgc

SEQ ID NO: 14936 - RNA, 31 nt, synthetic construct
  source 1..31: mol_type = other RNA
aggatgggcctccggttcaggccgcccatgc

SEQ ID NO: 14937 - RNA, 41 nt, synthetic construct
  source 1..41: mol_type = other RNA
gaggatgggcctccagtccgtgccggccattccggaactgt

SEQ ID NO: 14938 - RNA, 30 nt, synthetic construct
  source 1..30: mol_type = other RNA
aggatgactacgttcacggatggcgcatgc

SEQ ID NO: 14939 - RNA, 41 nt, synthetic construct
  source 1..41: mol_type = other RNA
atgggcctccactttccaacgcccctgcaggaactgttaca

SEQ ID NO: 14940 - RNA, 31 nt, synthetic construct
  source 1..31: mol_type = other RNA
gtgaggatgggtctcccgttggtgccgccca

SEQ ID NO: 14941 - RNA, 31 nt, synthetic construct
  source 1..31: mol_type = other RNA
ggcctccggtttatcgcgccggtgcgggaac

SEQ ID NO: 14942 - RNA, 31 nt, synthetic construct
  source 1..31: mol_type = other RNA
aggatgggcctccggattatgccgcccatgc

SEQ ID NO: 14943 - RNA, 31 nt, synthetic construct
  source 1..31: mol_type = other RNA
gtgaggaggggcctccagttcacgtcgccca

SEQ ID NO: 14944 - RNA, 31 nt, synthetic construct
  source 1..31: mol_type = other RNA
gtgaggatgggcctccgcttcatgtcgccca

SEQ ID NO: 14945 - RNA, 31 nt, synthetic construct
  source 1..31: mol_type = other RNA
aggattggcccccggttcatgccggacatgc

SEQ ID NO: 14946 - RNA, 30 nt, synthetic construct
  source 1..30: mol_type = other RNA
ggccttcggttcagccgcgcatcaaggaac

SEQ ID NO: 14947 - RNA, 31 nt, synthetic construct
  source 1..31: mol_type = other RNA
aggatcggccgccggttcatgtcgctcatgc

SEQ ID NO: 14948 - RNA, 39 nt, synthetic construct
  source 1..39: mol_type = other RNA
gatggtgatactggggcttcggttagccgcccatgcagg

SEQ ID NO: 14949 - RNA, 31 nt, synthetic construct
  source 1..31: mol_type = other RNA
atggtgagggtgggcgtccagttcatgccgc

SEQ ID NO: 14950 - RNA, 31 nt, synthetic construct
  source 1..31: mol_type = other RNA
aggatgggcgtccggttcataccacccatgc

SEQ ID NO: 14951 - RNA, 31 nt, synthetic construct
  source 1..31: mol_type = other RNA
aggatgggcctccagtcgatgtcgcccatgc

SEQ ID NO: 14952 - RNA, 36 nt, synthetic construct
  source 1..36: mol_type = other RNA
gtgatgagtgtgaggatgggcctccagctgggttca

SEQ ID NO: 14953 - RNA, 47 nt, synthetic construct
  source 1..47: mol_type = other RNA
gaggatgggcttccggctctagagaagcagcccatcgcaggaactgt

SEQ ID NO: 14954 - RNA, 50 nt, synthetic construct
  source 1..50: mol_type = other RNA
gaggatgggcattcagttcatggatctagacaacgtcgtgcgggaactgt

SEQ ID NO: 14955 - RNA, 31 nt, synthetic construct
  source 1..31: mol_type = other RNA
atggtgaggacatgcctccagtccgtgccgc

SEQ ID NO: 14956 - RNA, 31 nt, synthetic construct
  source 1..31: mol_type = other RNA
aggatgggtctccagttcatgccggccatgc

SEQ ID NO: 14957 - RNA, 41 nt, synthetic construct
  source 1..41: mol_type = other RNA
gaggatgggccttcaggtcatggagcccatgccggaactgt

SEQ ID NO: 14958 - RNA, 31 nt, synthetic construct
  source 1..31: mol_type = other RNA
aggatgggccttcaggtcatggagcccatgc

SEQ ID NO: 14959 - RNA, 26 nt, synthetic construct
  source 1..26: mol_type = other RNA
ggcctccggttcatgccgccaggaac

SEQ ID NO: 14960 - RNA, 31 nt, synthetic construct
  source 1..31: mol_type = other RNA
aggatgagcctccactttccaacgcccatgc

SEQ ID NO: 14961 - RNA, 31 nt, synthetic construct
  source 1..31: mol_type = other RNA
aggatgggcctccggttcgatgcgcccatgc

SEQ ID NO: 14962 - RNA, 31 nt, synthetic construct
  source 1..31: mol_type = other RNA
aggatgggcctccggtttatcgcgcccatgc

SEQ ID NO: 14963 - RNA, 32 nt, synthetic construct
  source 1..32: mol_type = other RNA
aggattgagcctccggttactgatgcccatgc

SEQ ID NO: 14964 - RNA, 41 nt, synthetic construct
  source 1..41: mol_type = other RNA
gaggatgggcctccagttcctgccgcctgtgcaggaactgt

SEQ ID NO: 14965 - RNA, 31 nt, synthetic construct
  source 1..31: mol_type = other RNA
atggtgaggttggattttcggttaatgccgc

SEQ ID NO: 14966 - RNA, 31 nt, synthetic construct
  source 1..31: mol_type = other RNA
ggcctccggttcttgccgcccgtgcaggaac

SEQ ID NO: 14967 - RNA, 41 nt, synthetic construct
  source 1..41: mol_type = other RNA
gaggatgggcctccgcttcatgtcgcccatgcgggaactgt

SEQ ID NO: 14968 - RNA, 31 nt, synthetic construct
  source 1..31: mol_type = other RNA
aggatgggcctccgcttcatgtcgcccatgc

SEQ ID NO: 14969 - RNA, 31 nt, synthetic construct
  source 1..31: mol_type = other RNA
aggatgggcctccggttcacgtcgcccatgc

SEQ ID NO: 14970 - RNA, 31 nt, synthetic construct
  source 1..31: mol_type = other RNA
ggcctccggttcacgtcggccaagcaggaac

SEQ ID NO: 14971 - RNA, 31 nt, synthetic construct
  source 1..31: mol_type = other RNA
ggcctccgctttataacggaaatgcaggaac

SEQ ID NO: 14972 - RNA, 31 nt, synthetic construct
  source 1..31: mol_type = other RNA
gtgaggatgggccttcggttcatgccgccca

SEQ ID NO: 14973 - RNA, 31 nt, synthetic construct
  source 1..31: mol_type = other RNA
atggtaaggttggtcctccggtccatgccgc

SEQ ID NO: 14974 - RNA, 31 nt, synthetic construct
  source 1..31: mol_type = other RNA
aggatggtcctccggtccatgatgcccatgc

SEQ ID NO: 14975 - RNA, 29 nt, synthetic construct
  source 1..29: mol_type = other RNA
gtgagactggggcttcggttagccgccca

SEQ ID NO: 14976 - RNA, 33 nt, synthetic construct
  source 1..33: mol_type = other RNA
ggcctccggcggccggcgcctgtttgcaggaac

SEQ ID NO: 14977 - RNA, 47 nt, synthetic construct
  source 1..47: mol_type = other RNA
aggatgggcctccggttcataccgctgagtagctgggatcaccatgc

SEQ ID NO: 14978 - RNA, 62 nt, synthetic construct
  source 1..62: mol_type = other RNA
gaggatgggcttccggttctagagaagtcgcccacacaattctgcagcttgcaaggaactgt

SEQ ID NO: 14979 - RNA, 36 nt, synthetic construct
  source 1..36: mol_type = other RNA
gtgaggatggacttccggttctaaagaagtcgccca

SEQ ID NO: 14980 - RNA, 29 nt, synthetic construct
  source 1..29: mol_type = other RNA
gtgagtgggcatccagtttatgccgccca

SEQ ID NO: 14981 - RNA, 31 nt, synthetic construct
  source 1..31: mol_type = other RNA
atggtgagaatgggccttcaggtcatgccgc

SEQ ID NO: 14982 - RNA, 38 nt, synthetic construct
  source 1..38: mol_type = other RNA
tgtgatgatggttaggatgtctacgttcacgccgccca

SEQ ID NO: 14983 - RNA, 41 nt, synthetic construct
  source 1..41: mol_type = other RNA
gaggatggctacgttcacggatggcgcatgctaggaactgt

SEQ ID NO: 14984 - RNA, 41 nt, synthetic construct
  source 1..41: mol_type = other RNA
gatggtgaagatgagcctccactttccaacgcccatgcagg

SEQ ID NO: 14985 - RNA, 31 nt, synthetic construct
  source 1..31: mol_type = other RNA
aggatgggtctcccgttggtgccgaccatgc

SEQ ID NO: 14986 - RNA, 32 nt, synthetic construct
  source 1..32: mol_type = other RNA
gtgaggattgagcctccggttactgatgccca

SEQ ID NO: 14987 - RNA, 29 nt, synthetic construct
  source 1..29: mol_type = other RNA
gtgaggatggccctccgatttatcgccca

SEQ ID NO: 14988 - RNA, 31 nt, synthetic construct
  source 1..31: mol_type = other RNA
aggatgggcctccagttaatgccgcccatgc

SEQ ID NO: 14989 - RNA, 31 nt, synthetic construct
  source 1..31: mol_type = other RNA
aggatgggcctccggttgatgctgctcatgc

SEQ ID NO: 14990 - RNA, 41 nt, synthetic construct
  source 1..41: mol_type = other RNA
gaggatgggcctacggttcatgccgccaatgcaggaactgt

SEQ ID NO: 14991 - RNA, 31 nt, synthetic construct
  source 1..31: mol_type = other RNA
aggatggattttcggttaataccgcccatgc

SEQ ID NO: 14992 - RNA, 31 nt, synthetic construct
  source 1..31: mol_type = other RNA
gtgaggccgggcctccggttcttgccgccca

SEQ ID NO: 14993 - RNA, 31 nt, synthetic construct
  source 1..31: mol_type = other RNA
gtgaggatgggtctccgctttataacgccca

SEQ ID NO: 14994 - RNA, 31 nt, synthetic construct
  source 1..31: mol_type = other RNA
ggccttcggttcatgccgcccaacgcggaac

SEQ ID NO: 14995 - RNA, 39 nt, synthetic construct
  source 1..39: mol_type = other RNA
tgtgatgaaggtggtactggggcttcggttagccgccca

SEQ ID NO: 14996 - RNA, 29 nt, synthetic construct
  source 1..29: mol_type = other RNA
aggatggggcttcggttagccgcccatgc

SEQ ID NO: 14997 - RNA, 31 nt, synthetic construct
  source 1..31: mol_type = other RNA
aggatgggcgtccagttcatgccgcccatgc

SEQ ID NO: 14998 - RNA, 31 nt, synthetic construct
  source 1..31: mol_type = other RNA
atggtgaggattgggctccggtttatgccgc

SEQ ID NO: 14999 - RNA, 30 nt, synthetic construct
  source 1..30: mol_type = other RNA
ggcctccggttaacgccgcccatgaggaac

SEQ ID NO: 15000 - RNA, 31 nt, synthetic construct
  source 1..31: mol_type = other RNA
aggatggggctccggttaacgccgcccatgc

SEQ ID NO: 15001 - RNA, 36 nt, synthetic construct
  source 1..36: mol_type = other RNA
aggatgggcttccggctctagagaagcagcccatgc

SEQ ID NO: 15002 - RNA, 31 nt, synthetic construct
  source 1..31: mol_type = other RNA
atggtgaagatgagcctccactttccgccgc

SEQ ID NO: 15003 - RNA, 41 nt, synthetic construct
  source 1..41: mol_type = other RNA
gaggatgggcctccactttccaacgcccctgcaggaactgt

SEQ ID NO: 15004 - RNA, 31 nt, synthetic construct
  source 1..31: mol_type = other RNA
aggatgggtctccggttgatgtcgaacatgc

SEQ ID NO: 15005 - RNA, 31 nt, synthetic construct
  source 1..31: mol_type = other RNA
ggcctccgatttatgccgcccgtgcaggaac

SEQ ID NO: 15006 - RNA, 31 nt, synthetic construct
  source 1..31: mol_type = other RNA
aggatgggcctccggtttatgcaacccatgc

SEQ ID NO: 15007 - RNA, 31 nt, synthetic construct
  source 1..31: mol_type = other RNA
aggatgggcctccggcttatggcgcccatgc

SEQ ID NO: 15008 - RNA, 29 nt, synthetic construct
  source 1..29: mol_type = other RNA
ggcctccggttcgtgaagcccatgggaac

SEQ ID NO: 15009 - RNA, 55 nt, synthetic construct
  source 1..55: mol_type = other RNA
gatggtgacgatggctcccatccggaatcccaacatttatgtcgccccatgcagg

SEQ ID NO: 15010 - RNA, 31 nt, synthetic construct
  source 1..31: mol_type = other RNA
aggatgggcctccagttcatgtcgcccatgc

SEQ ID NO: 15011 - RNA, 41 nt, synthetic construct
  source 1..41: mol_type = other RNA
gaggatgggactgcagttcatgtggcccatgtaggaactgt

SEQ ID NO: 15012 - RNA, 43 nt, synthetic construct
  source 1..43: mol_type = other RNA
atgggcctccggcggccggcgcctgtttgcagaaactgttaca

SEQ ID NO: 15013 - RNA, 36 nt, synthetic construct
  source 1..36: mol_type = other RNA
ggcctccggttctagagaagtagcccatgctggaac

SEQ ID NO: 15014 - RNA, 31 nt, synthetic construct
  source 1..31: mol_type = other RNA
aggatgggcctccggttactgctgcccatgc

SEQ ID NO: 15015 - RNA, 31 nt, synthetic construct
  source 1..31: mol_type = other RNA
aggataggcctccggttcaagccgcccatgc

SEQ ID NO: 15016 - RNA, 30 nt, synthetic construct
  source 1..30: mol_type = other RNA
gtgaggatggaccttcggttcagccgccca

SEQ ID NO: 15017 - RNA, 31 nt, synthetic construct
  source 1..31: mol_type = other RNA
ggcctccggttcatgtcgctcatgcaggaac

SEQ ID NO: 15018 - RNA, 36 nt, synthetic construct
  source 1..36: mol_type = other RNA
aggatggacttccggttctaaagaagtcgcccatgc

SEQ ID NO: 15019 - RNA, 31 nt, synthetic construct
  source 1..31: mol_type = other RNA
ggcctccggttcctgacgcccatcaaggaac

SEQ ID NO: 15020 - RNA, 31 nt, synthetic construct
  source 1..31: mol_type = other RNA
aggatgggcctccggttaatcacgaacatgc

SEQ ID NO: 15021 - RNA, 31 nt, synthetic construct
  source 1..31: mol_type = other RNA
gtgagaatgggccttcaggtcatggagccca

SEQ ID NO: 15022 - RNA, 31 nt, synthetic construct
  source 1..31: mol_type = other RNA
gtgagaatgggcctccggttcatgccgccca

SEQ ID NO: 15023 - RNA, 28 nt, synthetic construct
  source 1..28: mol_type = other RNA
atggttaggatgactacgttcacgccgc

SEQ ID NO: 15024 - RNA, 28 nt, synthetic construct
  source 1..28: mol_type = other RNA
gtgatgatggttaggatgtctacgttca

SEQ ID NO: 15025 - RNA, 31 nt, synthetic construct
  source 1..31: mol_type = other RNA
aggatgggcctccagtttatgccgcccatgc

SEQ ID NO: 15026 - RNA, 41 nt, synthetic construct
  source 1..41: mol_type = other RNA
tgtgatgactgtgaagatgagcctccactttccgccgccca

SEQ ID NO: 15027 - RNA, 41 nt, synthetic construct
  source 1..41: mol_type = other RNA
gaggatgggtctcccgttggtgccgaccatgcaggaactgt

SEQ ID NO: 15028 - RNA, 31 nt, synthetic construct
  source 1..31: mol_type = other RNA
aggatgagcctccaatttatgccgtccatgc

SEQ ID NO: 15029 - RNA, 31 nt, synthetic construct
  source 1..31: mol_type = other RNA
aggatgggcctccagttaataccgcccatgc

SEQ ID NO: 15030 - RNA, 55 nt, synthetic construct
  source 1..55: mol_type = other RNA
gaggatggctcccatccggaatcccaacatttatgtcgccccatgccggaactgt

SEQ ID NO: 15031 - RNA, 31 nt, synthetic construct
  source 1..31: mol_type = other RNA
aggatgggcatccagtttgtgccgcccatgc

SEQ ID NO: 15032 - RNA, 31 nt, synthetic construct
  source 1..31: mol_type = other RNA
ggcctgcagttcatgtggcccatgtaggaac

SEQ ID NO: 15033 - RNA, 31 nt, synthetic construct
  source 1..31: mol_type = other RNA
gtgaggatcggccgccggttcatgtcgccca

SEQ ID NO: 15034 - RNA, 41 nt, synthetic construct
  source 1..41: mol_type = other RNA
gaggatggggcttcggttagccgcccttatgcaggaactgt

SEQ ID NO: 15035 - RNA, 31 nt, synthetic construct
  source 1..31: mol_type = other RNA
aggatgggcctccggtttatgccgcccatgc

SEQ ID NO: 15036 - RNA, 52 nt, synthetic construct
  source 1..52: mol_type = other RNA
ggcctccggttctagagaagtcgcccacacaattctgcagcttgcaaggaac

SEQ ID NO: 15037 - RNA, 31 nt, synthetic construct
  source 1..31: mol_type = other RNA
aggatgggcctccggttaacgccgcccatgc

SEQ ID NO: 15038 - RNA, 50 nt, synthetic construct
  source 1..50: mol_type = other RNA
atgggccttcagttcatggatctagacaacgtcgtgcgggaactgttaca

SEQ ID NO: 15039 - RNA, 43 nt, synthetic construct
  source 1..43: mol_type = other RNA
aggatgggcctccggttccaaaaaaaaaaaatgccgcccatgc

SEQ ID NO: 15040 - RNA, 31 nt, synthetic construct
  source 1..31: mol_type = other RNA
aggatgggcatccagtttatgccgcccatgc

SEQ ID NO: 15041 - RNA, 38 nt, synthetic construct
  source 1..38: mol_type = other RNA
ttccagtgcgatgatggttaggatgactacgttcatgc

SEQ ID NO: 15042 - RNA, 40 nt, synthetic construct
  source 1..40: mol_type = other RNA
gaggatgggcctccggtttctgaagcccataaggaactgt

SEQ ID NO: 15043 - RNA, 31 nt, synthetic construct
  source 1..31: mol_type = other RNA
gtgaggatgggcctccagttaatgccgccca

SEQ ID NO: 15044 - RNA, 56 nt, synthetic construct
  source 1..56: mol_type = other RNA
tgtgatgatatggtgacgatggctcccatccggaatcccaacatttatgccgccca

SEQ ID NO: 15045 - RNA, 31 nt, synthetic construct
  source 1..31: mol_type = other RNA
aggataggctgccggttcatgccgtccatgc

SEQ ID NO: 15046 - RNA, 31 nt, synthetic construct
  source 1..31: mol_type = other RNA
aggatgggcctccggttcatatcgcccatgc

SEQ ID NO: 15047 - RNA, 31 nt, synthetic construct
  source 1..31: mol_type = other RNA
aggatggaactccggttcatgtcgcccatgc

SEQ ID NO: 15048 - RNA, 31 nt, synthetic construct
  source 1..31: mol_type = other RNA
aggattggcctccggttcacgtcggccatgc

SEQ ID NO: 15049 - RNA, 31 nt, synthetic construct
  source 1..31: mol_type = other RNA
ggcctccggttcacgccgcccatgaaggaac

SEQ ID NO: 15050 - RNA, 31 nt, synthetic construct
  source 1..31: mol_type = other RNA
aggatgggcgtccagttcttgacccccatgc

SEQ ID NO: 15051 - RNA, 31 nt, synthetic construct
  source 1..31: mol_type = other RNA
aggatggccctccggttcatcctgcccatgc

SEQ ID NO: 15052 - RNA, 31 nt, synthetic construct
  source 1..31: mol_type = other RNA
gtgaggatgggcctccggcggccggcgccca

SEQ ID NO: 15053 - RNA, 44 nt, synthetic construct
  source 1..44: mol_type = other RNA
ggcctccggtcttaaattcctagtcatgacgcctatgccggaac

SEQ ID NO: 15054 - RNA, 36 nt, synthetic construct
  source 1..36: mol_type = other RNA
aggatgggcttccggttctagagaagtagcccatgc

SEQ ID NO: 15055 - RNA, 31 nt, synthetic construct
  source 1..31: mol_type = other RNA
gtgaggatgagcctccactttccaacgccca

SEQ ID NO: 15056 - RNA, 31 nt, synthetic construct
  source 1..31: mol_type = other RNA
aggatgggcctccgatttatgccgcccatgc

SEQ ID NO: 15057 - RNA, 31 nt, synthetic construct
  source 1..31: mol_type = other RNA
aggatgtgtctccagttcatgcagcccatgc

SEQ ID NO: 15058 - RNA, 31 nt, synthetic construct
  source 1..31: mol_type = other RNA
gtgaggacgggcctccagttaataccgccca

SEQ ID NO: 15059 - RNA, 32 nt, synthetic construct
  source 1..32: mol_type = other RNA
aggatgggtatccagttcatgctcgcccatgc

SEQ ID NO: 15060 - RNA, 33 nt, synthetic construct
  source 1..33: mol_type = other RNA
gaggatgggcccccggtcccatgcaggaactgt

SEQ ID NO: 15061 - RNA, 42 nt, synthetic construct
  source 1..42: mol_type = other RNA
ggcctccggaatcccaacatttatgtcgccccatgccggaac

SEQ ID NO: 15062 - RNA, 44 nt, synthetic construct
  source 1..44: mol_type = other RNA
gtgaggatggctcccatccggaatcccaacatttatgtcgccca

SEQ ID NO: 15063 - RNA, 31 nt, synthetic construct
  source 1..31: mol_type = other RNA
aggatgggtctccgctttataacggacatgc

SEQ ID NO: 15064 - RNA, 33 nt, synthetic construct
  source 1..33: mol_type = other RNA
aggatgggcctccagttcacgccgccaccatgc

SEQ ID NO: 15065 - RNA, 30 nt, synthetic construct
  source 1..30: mol_type = other RNA
aggatggaccttcggttcagccgcgcatgc

SEQ ID NO: 15066 - RNA, 33 nt, synthetic construct
  source 1..33: mol_type = other RNA
gtgatgctggtgaggaagtgcctcttcggttca

SEQ ID NO: 15067 - RNA, 31 nt, synthetic construct
  source 1..31: mol_type = other RNA
aggatgggcctccggcggccggcgcccatgc

SEQ ID NO: 15068 - RNA, 43 nt, synthetic construct
  source 1..43: mol_type = other RNA
gaggatgggcatccagtttatgccgcccatctcaaggaactgt

SEQ ID NO: 15069 - RNA, 31 nt, synthetic construct
  source 1..31: mol_type = other RNA
gtgaggatgagcctccaatttatgccgccca

SEQ ID NO: 15070 - RNA, 31 nt, synthetic construct
  source 1..31: mol_type = other RNA
aggatgggtctccggtaaatgctgcccatgc

SEQ ID NO: 15071 - RNA, 44 nt, synthetic construct
  source 1..44: mol_type = other RNA
atggtgacgatggctcccatccggaatcccaacatttatgccgc

SEQ ID NO: 15072 - RNA, 31 nt, synthetic construct
  source 1..31: mol_type = other RNA
aggatgggtatccggttcatgccgcccatgc

SEQ ID NO: 15073 - RNA, 31 nt, synthetic construct
  source 1..31: mol_type = other RNA
aggatgggccttcggttcatgccgcccatgc

SEQ ID NO: 15074 - RNA, 31 nt, synthetic construct
  source 1..31: mol_type = other RNA
aggatgggcgtccggttcatgccactcatgc

SEQ ID NO: 15075 - RNA, 28 nt, synthetic construct
  source 1..28: mol_type = other RNA
gtgaggatgactacgttcacggagccca

SEQ ID NO: 15076 - RNA, 31 nt, synthetic construct
  source 1..31: mol_type = other RNA
aggatgggcctacggttcatgccgcccatgc

SEQ ID NO: 15077 - RNA, 41 nt, synthetic construct
  source 1..41: mol_type = other RNA
gaggatgggtctccgctttataacggaaatgcaggaactgt

SEQ ID NO: 15078 - RNA, 32 nt, synthetic construct
  source 1..32: mol_type = other RNA
aggatgggcctccggttcccgccgccccatgc

SEQ ID NO: 15079 - RNA, 33 nt, synthetic construct
  source 1..33: mol_type = other RNA
atggtgaggaagtgcctcttcggttcatgccgc

SEQ ID NO: 15080 - RNA, 31 nt, synthetic construct
  source 1..31: mol_type = other RNA
aggatgggactgcagttcatgtggcccatgc

SEQ ID NO: 15081 - RNA, 43 nt, synthetic construct
  source 1..43: mol_type = other RNA
gaggatgggcctccggcggccggcgcctgtttgcaggaactgt

SEQ ID NO: 15082 - RNA, 29 nt, synthetic construct
  source 1..29: mol_type = other RNA
gtgatgatggtgaggatgcctaccgttca

SEQ ID NO: 15083 - RNA, 31 nt, synthetic construct
  source 1..31: mol_type = other RNA
gtgaggacatgcctccagtccgtgccgccca

SEQ ID NO: 15084 - RNA, 41 nt, synthetic construct
  source 1..41: mol_type = other RNA
gaggatgggcctccggttaatcacgaagatgcaggaactgt

SEQ ID NO: 15085 - RNA, 23 nt, synthetic construct
  source 1..23: mol_type = other RNA
aggatgggcccccggtcccatgc

SEQ ID NO: 15086 - RNA, 29 nt, synthetic construct
  source 1..29: mol_type = other RNA
atggtggtactggggcttcggttagccgc

SEQ ID NO: 15087 - RNA, 40 nt, synthetic construct
  source 1..40: mol_type = other RNA
cccaggacaggcccaaacacaccttcgcagcggttccgtc

SEQ ID NO: 15088 - RNA, 41 nt, synthetic construct
  source 1..41: mol_type = other RNA
gcgccggtccctcccaggaacagcacagacacgcacctcaa

SEQ ID NO: 15089 - RNA, 41 nt, synthetic construct
  source 1..41: mol_type = other RNA
gcgccggtctctccaaggccaggcacggacacgcacctcaa

SEQ ID NO: 15090 - RNA, 41 nt, synthetic construct
  source 1..41: mol_type = other RNA
gtctctcccaggaaaggcaggaacacgcacctcaaagctgt

SEQ ID NO: 15091 - RNA, 41 nt, synthetic construct
  source 1..41: mol_type = other RNA
gcgccggtctctaccaggactggcgcaaacacgcacctcaa

SEQ ID NO: 15092 - RNA, 41 nt, synthetic construct
  source 1..41: mol_type = other RNA
gcgccggtctctaccaggacagggtcaaacacgcacctcaa

SEQ ID NO: 15093 - RNA, 41 nt, synthetic construct
  source 1..41: mol_type = other RNA
gcgccggtctctccaaggacaggcggaatcacgcacctcaa

SEQ ID NO: 15094 - RNA, 41 nt, synthetic construct
  source 1..41: mol_type = other RNA
gcgccggtcacttccaggaagggcccaaacacgcacctcaa

SEQ ID NO: 15095 - RNA, 41 nt, synthetic construct
  source 1..41: mol_type = other RNA
gcgccggtctgtcccaggacgggcgcaaaaacgcacctcaa

SEQ ID NO: 15096 - RNA, 40 nt, synthetic construct
  source 1..40: mol_type = other RNA
gtctctcccagaaccggacaaacacgcatctcaaagctgt

SEQ ID NO: 15097 - RNA, 41 nt, synthetic construct
  source 1..41: mol_type = other RNA
gtctctcccaggataggcacaaacacgcacataaaagctgt

SEQ ID NO: 15098 - RNA, 41 nt, synthetic construct
  source 1..41: mol_type = other RNA
gcgccggtctctcacaggccaggcccaaacacacacctcaa

SEQ ID NO: 15099 - RNA, 41 nt, synthetic construct
  source 1..41: mol_type = other RNA
gcgccggtcactcccaggaaaggcaggaacacgcacctcaa

SEQ ID NO: 15100 - RNA, 41 nt, synthetic construct
  source 1..41: mol_type = other RNA
gcgccggtctcccccaggacaggcaaaaacacgcacctcaa

SEQ ID NO: 15101 - RNA, 40 nt, synthetic construct
  source 1..40: mol_type = other RNA
gcgccggtctctcccagaaccggacaaacacgcacctcaa

SEQ ID NO: 15102 - RNA, 41 nt, synthetic construct
  source 1..41: mol_type = other RNA
gcgccggtcactcccaggaaaggcgcgaacacgcacctcaa

SEQ ID NO: 15103 - RNA, 41 nt, synthetic construct
  source 1..41: mol_type = other RNA
gcgccggtctctccaaggacaggaccaaacacgcacctcaa

SEQ ID NO: 15104 - RNA, 41 nt, synthetic construct
  source 1..41: mol_type = other RNA
gcgccggtcacttcgaggaaaggcaggaacacgcacctcaa

SEQ ID NO: 15105 - RNA, 41 nt, synthetic construct
  source 1..41: mol_type = other RNA
gcgccggtcactcccaggaaaggcgcaaacacgcacctcaa

SEQ ID NO: 15106 - RNA, 41 nt, synthetic construct
  source 1..41: mol_type = other RNA
gcgccggtgtctcccaggactggtgcaaacacgcacctcaa

SEQ ID NO: 15107 - RNA, 41 nt, synthetic construct
  source 1..41: mol_type = other RNA
gcgccggtacctcccaggaaaggcacgaacacgcacctcaa

SEQ ID NO: 15108 - RNA, 31 nt, synthetic construct
  source 1..31: mol_type = other RNA
tctctcccaggacaggcagaaacacgcacct

SEQ ID NO: 15109 - RNA, 41 nt, synthetic construct
  source 1..41: mol_type = other RNA
gcgccggtctctcccaggacaggaacaagcgcgcacctcaa

SEQ ID NO: 15110 - RNA, 41 nt, synthetic construct
  source 1..41: mol_type = other RNA
gcgccggtcactcccaggaaaggtacgaacacgcacctcaa

SEQ ID NO: 15111 - RNA, 41 nt, synthetic construct
  source 1..41: mol_type = other RNA
gcgccggtctctaccaggacaggcccaaacacgcacctcaa

SEQ ID NO: 15112 - RNA, 41 nt, synthetic construct
  source 1..41: mol_type = other RNA
gtctctcccaggaaaggcacaaatacgcacctcaaagctgt

SEQ ID NO: 15113 - RNA, 41 nt, synthetic construct
  source 1..41: mol_type = other RNA
gcgccggtctcttccaggacaggcagaaacacacacctcaa

SEQ ID NO: 15114 - RNA, 40 nt, synthetic construct
  source 1..40: mol_type = other RNA
gcgccggtctctcccaggagggcacaaagacgcacctcaa

SEQ ID NO: 15115 - RNA, 41 nt, synthetic construct
  source 1..41: mol_type = other RNA
gcgccggtctgtcccacgacgggcgcaaaaacgcacctcaa

SEQ ID NO: 15116 - RNA, 41 nt, synthetic construct
  source 1..41: mol_type = other RNA
gtctctcccaggaaaggcaaaaacacgcacctcaaagctgt

SEQ ID NO: 15117 - RNA, 41 nt, synthetic construct
  source 1..41: mol_type = other RNA
gtctctcccaggaaagggacgaacacgcatctcaaagctgt

SEQ ID NO: 15118 - RNA, 41 nt, synthetic construct
  source 1..41: mol_type = other RNA
gcgccggtctctccccggacaggtatacacacgcacctcaa

SEQ ID NO: 15119 - RNA, 31 nt, synthetic construct
  source 1..31: mol_type = other RNA
tctctcccaggacaggcaaaaacacgcacct

SEQ ID NO: 15120 - RNA, 41 nt, synthetic construct
  source 1..41: mol_type = other RNA
gtctctcccaggacagggacaaacacgcgcatcaaagctgt

SEQ ID NO: 15121 - RNA, 41 nt, synthetic construct
  source 1..41: mol_type = other RNA
gcgccggtctctcccaggacagtcacaaaaacgcacctcaa

SEQ ID NO: 15122 - RNA, 40 nt, synthetic construct
  source 1..40: mol_type = other RNA
gtctctcccggggcaggataaacacgcgccccaaagctgt

SEQ ID NO: 15123 - RNA, 41 nt, synthetic construct
  source 1..41: mol_type = other RNA
gtctctcccaggacaggcgcaaacacgcaactcaaagctgt

SEQ ID NO: 15124 - RNA, 41 nt, synthetic construct
  source 1..41: mol_type = other RNA
gcgccggtcactaccaggaaaggcaggaacacgcacctcaa

SEQ ID NO: 15125 - RNA, 41 nt, synthetic construct
  source 1..41: mol_type = other RNA
gtctctcccaggacaggcacaaacacgctcctcaaagctgt

SEQ ID NO: 15126 - RNA, 41 nt, synthetic construct
  source 1..41: mol_type = other RNA
gcgccggtctctcccaggacaggcagaaacacgcacctcaa

SEQ ID NO: 15127 - RNA, 41 nt, synthetic construct
  source 1..41: mol_type = other RNA
gcgccggtctcttccaggacaggcgcaaacacgcacctcaa

SEQ ID NO: 15128 - RNA, 41 nt, synthetic construct
  source 1..41: mol_type = other RNA
gtctctcccaggacaggcacaaacacgcacctcaaagctgt

SEQ ID NO: 15129 - RNA, 41 nt, synthetic construct
  source 1..41: mol_type = other RNA
gcgccggtctctaccaggacaggtctaagcacacacctcaa

SEQ ID NO: 15130 - RNA, 41 nt, synthetic construct
  source 1..41: mol_type = other RNA
gtctctcccaggacgggcgcaaaaacgcagctcaaagctgt

SEQ ID NO: 15131 - RNA, 31 nt, synthetic construct
  source 1..31: mol_type = other RNA
tctctccccggataggcacaaacacgcacct

SEQ ID NO: 15132 - RNA, 41 nt, synthetic construct
  source 1..41: mol_type = other RNA
gcgccggtgtctcccaggacagggacaaacacgcacctcaa

SEQ ID NO: 15133 - RNA, 40 nt, synthetic construct
  source 1..40: mol_type = other RNA
gcgccggtctttcccaggagggcagaaagacacacctcaa

SEQ ID NO: 15134 - RNA, 31 nt, synthetic construct
  source 1..31: mol_type = other RNA
tctcttccaggaaaggcacaaatacgcacct

SEQ ID NO: 15135 - RNA, 41 nt, synthetic construct
  source 1..41: mol_type = other RNA
gtctctcccaggacaggcagaaacacgcccctcaaagctgt

SEQ ID NO: 15136 - RNA, 41 nt, synthetic construct
  source 1..41: mol_type = other RNA
gtctctccgaggaaaggcaggaacacgcacctcaaagctgt

SEQ ID NO: 15137 - RNA, 41 nt, synthetic construct
  source 1..41: mol_type = other RNA
gcgccggtcaaccccaggaaaggcacgaacacgcacctcaa

SEQ ID NO: 15138 - RNA, 40 nt, synthetic construct
  source 1..40: mol_type = other RNA
gcgccggtctcggccggggcaggataaacacgcacctcaa

SEQ ID NO: 15139 - RNA, 31 nt, synthetic construct
  source 1..31: mol_type = other RNA
tctctcccaggaaaggcaggaacacgcacct

SEQ ID NO: 15140 - RNA, 41 nt, synthetic construct
  source 1..41: mol_type = other RNA
gtctctcccaggccatgcagaaacacacacctcaaagctgt

SEQ ID NO: 15141 - RNA, 41 nt, synthetic construct
  source 1..41: mol_type = other RNA
gtctctcccaggaacagcacagacacgcaccttaaagctgt

SEQ ID NO: 15142 - RNA, 41 nt, synthetic construct
  source 1..41: mol_type = other RNA
gtctctcccaggacaggcacaaatacgcacctcaaagctgt

SEQ ID NO: 15143 - RNA, 41 nt, synthetic construct
  source 1..41: mol_type = other RNA
gtctctcccaggacagtcacaaaaacgcacctgaaagctgt

SEQ ID NO: 15144 - RNA, 41 nt, synthetic construct
  source 1..41: mol_type = other RNA
gcgccggtctctaccgggacagaaccaaacacacacctcaa

SEQ ID NO: 15145 - RNA, 41 nt, synthetic construct
  source 1..41: mol_type = other RNA
gcgccggtctctcccaggacaggcaaaaacacacacctcaa

SEQ ID NO: 15146 - RNA, 41 nt, synthetic construct
  source 1..41: mol_type = other RNA
gtctctcccaggacaggcacaaacacacacctcaaagctgt

SEQ ID NO: 15147 - RNA, 41 nt, synthetic construct
  source 1..41: mol_type = other RNA
gcgccggtctcttccaggacaggcgcacacacgcacctcaa

SEQ ID NO: 15148 - RNA, 41 nt, synthetic construct
  source 1..41: mol_type = other RNA
gcgccggtctctcccaggatgggcacgagaccccacctcaa

SEQ ID NO: 15149 - RNA, 41 nt, synthetic construct
  source 1..41: mol_type = other RNA
gtctctcccaggaaaggcgcgaacacgctcctcaaagctgt

SEQ ID NO: 15150 - RNA, 41 nt, synthetic construct
  source 1..41: mol_type = other RNA
gcgccggtcactcccagaccaggtaaccacacgcacctcaa

SEQ ID NO: 15151 - RNA, 41 nt, synthetic construct
  source 1..41: mol_type = other RNA
gcacaaacacactcctcaaaacggttccgtcccagtagatt

SEQ ID NO: 15152 - RNA, 31 nt, synthetic construct
  source 1..31: mol_type = other RNA
tctctcccaggacagggacaaacacgcacct

SEQ ID NO: 15153 - RNA, 41 nt, synthetic construct
  source 1..41: mol_type = other RNA
gcgccggtctctaccaggacaggcactaacacacacctcaa

SEQ ID NO: 15154 - RNA, 41 nt, synthetic construct
  source 1..41: mol_type = other RNA
gtctctcccaggacaggcagatacacacacctcaaagctgt

SEQ ID NO: 15155 - RNA, 41 nt, synthetic construct
  source 1..41: mol_type = other RNA
gtctctcccaggataggcaaacacacacacctcaaagctgt

SEQ ID NO: 15156 - RNA, 41 nt, synthetic construct
  source 1..41: mol_type = other RNA
gtctctcccaggacaggcacaaacacgcaccttaaagctgt

SEQ ID NO: 15157 - RNA, 41 nt, synthetic construct
  source 1..41: mol_type = other RNA
gtctctcccaggacgggcacaaacacacacctcaaagctgt

SEQ ID NO: 15158 - RNA, 41 nt, synthetic construct
  source 1..41: mol_type = other RNA
gcgccggtctctccccggacaggccgaaacacgcacctcaa

SEQ ID NO: 15159 - RNA, 41 nt, synthetic construct
  source 1..41: mol_type = other RNA
gtctctcccaggaagggcccaaacacgcacctcaaagctgt

SEQ ID NO: 15160 - RNA, 31 nt, synthetic construct
  source 1..31: mol_type = other RNA
tctctcccaggaaaggcaaaaacacgcacct

SEQ ID NO: 15161 - RNA, 41 nt, synthetic construct
  source 1..41: mol_type = other RNA
gcgccggtctcacccaggacaggcagaaacgcgcacctcaa

SEQ ID NO: 15162 - RNA, 41 nt, synthetic construct
  source 1..41: mol_type = other RNA
gcgccggtcaaccccaggacaggcagaaacacgcacctcaa

SEQ ID NO: 15163 - RNA, 41 nt, synthetic construct
  source 1..41: mol_type = other RNA
acaggcacaaacacacacctcaaagcggttccgtcccagta

SEQ ID NO: 15164 - RNA, 41 nt, synthetic construct
  source 1..41: mol_type = other RNA
gtctctcccaggaaaggcgcaaacacgctcctcaaagctgt

SEQ ID NO: 15165 - RNA, 41 nt, synthetic construct
  source 1..41: mol_type = other RNA
gcgccggtctctcccaggaaaggcacgaacacgcacctcaa

SEQ ID NO: 15166 - RNA, 41 nt, synthetic construct
  source 1..41: mol_type = other RNA
gtctctcccaggaaaggcacgaacacgcacccaaaagctgt

SEQ ID NO: 15167 - RNA, 41 nt, synthetic construct
  source 1..41: mol_type = other RNA
gtctctcccaggacaggcacaaacacacacgtcaaagctgt

SEQ ID NO: 15168 - RNA, 41 nt, synthetic construct
  source 1..41: mol_type = other RNA
gcgccggtctcttccaggacgggcacaaacacacacctcaa

SEQ ID NO: 15169 - RNA, 41 nt, synthetic construct
  source 1..41: mol_type = other RNA
gcgccggtcactcccaggaaaggcacgaacacgcacctcaa

SEQ ID NO: 15170 - RNA, 41 nt, synthetic construct
  source 1..41: mol_type = other RNA
gcacaaacacacatctcaaaacggttccatcccagtagatt

SEQ ID NO: 15171 - RNA, 41 nt, synthetic construct
  source 1..41: mol_type = other RNA
gtctctcccaggacagctacaaacacacacatcaaagctgt

SEQ ID NO: 15172 - RNA, 41 nt, synthetic construct
  source 1..41: mol_type = other RNA
gtctctcccaggacaggcgcacacacgcgtctcaaagctgt

SEQ ID NO: 15173 - RNA, 42 nt, synthetic construct
  source 1..42: mol_type = other RNA
gtctctcccaggatcaggcacaaacacacacctcaaagctgt

SEQ ID NO: 15174 - RNA, 41 nt, synthetic construct
  source 1..41: mol_type = other RNA
gtctctcccaggacaggcagaatcacacccctcaaagctgt

SEQ ID NO: 15175 - RNA, 41 nt, synthetic construct
  source 1..41: mol_type = other RNA
gtctctcccaggacaggcagaaacacgcacctcaaagctgt

SEQ ID NO: 15176 - RNA, 41 nt, synthetic construct
  source 1..41: mol_type = other RNA
gtctctccaaagataggcaccaacacgcacatcaaagctgt

SEQ ID NO: 15177 - RNA, 31 nt, synthetic construct
  source 1..31: mol_type = other RNA
tctctccaaggacaggcggaatcacgcacct

SEQ ID NO: 15178 - RNA, 41 nt, synthetic construct
  source 1..41: mol_type = other RNA
gtctctcccaggaaaggcacgaacacgcctctcaaagctgt

SEQ ID NO: 15179 - RNA, 41 nt, synthetic construct
  source 1..41: mol_type = other RNA
gcgccggtcactaccaggaaacgcacgaacacgcacctcaa

SEQ ID NO: 15180 - RNA, 41 nt, synthetic construct
  source 1..41: mol_type = other RNA
gcacaaacacacacctcaaggcggttccgtcccagtagatt

SEQ ID NO: 15181 - RNA, 31 nt, synthetic construct
  source 1..31: mol_type = other RNA
tctctcccaggaaaggtacgaacacgcacct

SEQ ID NO: 15182 - RNA, 41 nt, synthetic construct
  source 1..41: mol_type = other RNA
gcgccggtctcccctaggacagacatgaacacacacctcaa

SEQ ID NO: 15183 - RNA, 40 nt, synthetic construct
  source 1..40: mol_type = other RNA
gcgccggtcctcccagggcaggcacacacacgcacctcaa

SEQ ID NO: 15184 - RNA, 41 nt, synthetic construct
  source 1..41: mol_type = other RNA
gcgccggtcacttctaggcaaggcacgaacacgcacctcaa

SEQ ID NO: 15185 - RNA, 41 nt, synthetic construct
  source 1..41: mol_type = other RNA
gtctctcccaggacaggcaaaaacacgcacctcaaagctgt

SEQ ID NO: 15186 - RNA, 41 nt, synthetic construct
  source 1..41: mol_type = other RNA
gcgccggtctctccccggactggctcaaacgcacacctcaa

SEQ ID NO: 15187 - RNA, 41 nt, synthetic construct
  source 1..41: mol_type = other RNA
gtctctcccgggatgggcacaaacacgcacttcaaagctgt

SEQ ID NO: 15188 - RNA, 41 nt, synthetic construct
  source 1..41: mol_type = other RNA
gcacaaacacacgtctcaaggcggttccgtcccagtagatt

SEQ ID NO: 15189 - RNA, 41 nt, synthetic construct
  source 1..41: mol_type = other RNA
gcgccggtcacttccaggaaaggcacgaacacacacctcaa

SEQ ID NO: 15190 - RNA, 41 nt, synthetic construct
  source 1..41: mol_type = other RNA
gcacaaacacacatctcagagcggttccgtgccagtagatt

SEQ ID NO: 15191 - RNA, 41 nt, synthetic construct
  source 1..41: mol_type = other RNA
acaggcacaaacacacacctcaaagcggttccatcccagta

SEQ ID NO: 15192 - RNA, 42 nt, synthetic construct
  source 1..42: mol_type = other RNA
gcgccggtctctcccaggatcaggcacaaacacacacctcaa

SEQ ID NO: 15193 - RNA, 41 nt, synthetic construct
  source 1..41: mol_type = other RNA
gtctctcccaggacagacacaaacacacacctcaaagctgt

SEQ ID NO: 15194 - RNA, 30 nt, synthetic construct
  source 1..30: mol_type = other RNA
tctctcccagaaccggacaaacacgcacct

SEQ ID NO: 15195 - RNA, 41 nt, synthetic construct
  source 1..41: mol_type = other RNA
gtctctcccaggatgggcacaaacacacagcccaaagctgt

SEQ ID NO: 15196 - RNA, 41 nt, synthetic construct
  source 1..41: mol_type = other RNA
gcgccggtatctcccaggacaggcagaatcacacacctcaa

SEQ ID NO: 15197 - RNA, 41 nt, synthetic construct
  source 1..41: mol_type = other RNA
acaggcacaaacacacacctcaaggtggttccgtcccagta

SEQ ID NO: 15198 - RNA, 41 nt, synthetic construct
  source 1..41: mol_type = other RNA
acaggcacaaacacacacctcaaagcgattccgtcccagta

SEQ ID NO: 15199 - RNA, 41 nt, synthetic construct
  source 1..41: mol_type = other RNA
gcacaaacacacacctcaaagcggttcagtcccagtagatt

SEQ ID NO: 15200 - RNA, 41 nt, synthetic construct
  source 1..41: mol_type = other RNA
gtctctcccagaccaggtaaccacacgcacctcaaagctgt

SEQ ID NO: 15201 - RNA, 41 nt, synthetic construct
  source 1..41: mol_type = other RNA
gtctctccccggacaggtatacacacgcacgtcaaagctgt

SEQ ID NO: 15202 - RNA, 41 nt, synthetic construct
  source 1..41: mol_type = other RNA
gcgccggtctctcccaggataggcaaacacacacacctcaa

SEQ ID NO: 15203 - RNA, 41 nt, synthetic construct
  source 1..41: mol_type = other RNA
gcgccggtctcccccaggacaggcacaaatgcgcacctcaa

SEQ ID NO: 15204 - RNA, 41 nt, synthetic construct
  source 1..41: mol_type = other RNA
acaggcacaaacacacatctcagagcggttccgtcccagta

SEQ ID NO: 15205 - RNA, 39 nt, synthetic construct
  source 1..39: mol_type = other RNA
gtctctccaaggaaccacaaacacgcacctcaaagctgt

SEQ ID NO: 15206 - RNA, 41 nt, synthetic construct
  source 1..41: mol_type = other RNA
gcacaaacacacacatcaaagcggttccgtcccagtagatt

SEQ ID NO: 15207 - RNA, 41 nt, synthetic construct
  source 1..41: mol_type = other RNA
acaggcacaaacacacacatcaaagcggttccgtcccagta

SEQ ID NO: 15208 - RNA, 41 nt, synthetic construct
  source 1..41: mol_type = other RNA
gcgccggtctctggcaggacaggcacaaacacgcacctcaa

SEQ ID NO: 15209 - RNA, 41 nt, synthetic construct
  source 1..41: mol_type = other RNA
gtctctcccaggactggcgcaaacacgctcctcaaagctgt

SEQ ID NO: 15210 - RNA, 31 nt, synthetic construct
  source 1..31: mol_type = other RNA
ccaggaacagcacagacacgcaccttaaagc

SEQ ID NO: 15211 - RNA, 41 nt, synthetic construct
  source 1..41: mol_type = other RNA
gcgccggtctcttccaggaaaggcacaaatacgcacctcaa

SEQ ID NO: 15212 - RNA, 41 nt, synthetic construct
  source 1..41: mol_type = other RNA
gcacaaacacacacctcaaagtggttccgtcccagtagatt

SEQ ID NO: 15213 - RNA, 31 nt, synthetic construct
  source 1..31: mol_type = other RNA
tctctcccaggacgggcgcaaaaacgcacct

SEQ ID NO: 15214 - RNA, 41 nt, synthetic construct
  source 1..41: mol_type = other RNA
gtctctcccaggaaaggcgcgaacacgcacctcaaagctgt

SEQ ID NO: 15215 - RNA, 41 nt, synthetic construct
  source 1..41: mol_type = other RNA
gtctctcccaggaaaggcacgaacacgcacctcaaagctgt

SEQ ID NO: 15216 - RNA, 41 nt, synthetic construct
  source 1..41: mol_type = other RNA
gcacaaacacacacctcaaggcggttccgacccagtagatt

SEQ ID NO: 15217 - RNA, 41 nt, synthetic construct
  source 1..41: mol_type = other RNA
gtctctccccggacaggccgaaacacgcacctcaaagctgt

SEQ ID NO: 15218 - RNA, 41 nt, synthetic construct
  source 1..41: mol_type = other RNA
gtctctcccagacaaggtacgcacacgcacctcaaagctgt

SEQ ID NO: 15219 - RNA, 41 nt, synthetic construct
  source 1..41: mol_type = other RNA
gcgccggtttctcccaggtcaggcacaaacacgcacctcaa

SEQ ID NO: 15220 - RNA, 41 nt, synthetic construct
  source 1..41: mol_type = other RNA
gcgccggtcactccaaggaaacgcaacaacacgcacctcaa

SEQ ID NO: 15221 - RNA, 41 nt, synthetic construct
  source 1..41: mol_type = other RNA
gtctctccagggacaggcaccaatacgcacatcaaagctgt

SEQ ID NO: 15222 - RNA, 41 nt, synthetic construct
  source 1..41: mol_type = other RNA
gcgccggtatctcccaggacaggcaagaacgcgcacctcaa

SEQ ID NO: 15223 - RNA, 41 nt, synthetic construct
  source 1..41: mol_type = other RNA
acaggcacagacacacacctcaaggcggttccgtcccagta

SEQ ID NO: 15224 - RNA, 31 nt, synthetic construct
  source 1..31: mol_type = other RNA
tctctcccaggaaagggacgaacacgcacct

SEQ ID NO: 15225 - RNA, 41 nt, synthetic construct
  source 1..41: mol_type = other RNA
gtctctcccaggataggcacacacacacacctaaaagctgt

SEQ ID NO: 15226 - RNA, 41 nt, synthetic construct
  source 1..41: mol_type = other RNA
gcacaaacacacacttcagagcgcttccgtcccagtagatt

SEQ ID NO: 15227 - RNA, 41 nt, synthetic construct
  source 1..41: mol_type = other RNA
acaggcacacacacacacctcaaagtggttccgtcccagta

SEQ ID NO: 15228 - RNA, 31 nt, synthetic construct
  source 1..31: mol_type = other RNA
tctctcccaggaaaggcgcgaacacgcacct

SEQ ID NO: 15229 - RNA, 31 nt, synthetic construct
  source 1..31: mol_type = other RNA
tctctcccaggacagtcacaaaaacgcacct

SEQ ID NO: 15230 - RNA, 31 nt, synthetic construct
  source 1..31: mol_type = other RNA
tctctcccaggaaaggcgcaaacacgcacct

SEQ ID NO: 15231 - RNA, 31 nt, synthetic construct
  source 1..31: mol_type = other RNA
tctctcccaggaaaggcacgaacacgcacct

SEQ ID NO: 15232 - RNA, 41 nt, synthetic construct
  source 1..41: mol_type = other RNA
gcgccggtctctcccaggacaggcagatacacacacctcaa

SEQ ID NO: 15233 - RNA, 41 nt, synthetic construct
  source 1..41: mol_type = other RNA
gcacaaacacacacatcaaggcggttccgtcccagtagatt

SEQ ID NO: 15234 - RNA, 41 nt, synthetic construct
  source 1..41: mol_type = other RNA
gcacaaacacacacctcaaagcggttccatcccagtagatt

SEQ ID NO: 15235 - RNA, 31 nt, synthetic construct
  source 1..31: mol_type = other RNA
tctctccccggacaggccgaaacacgcacct

SEQ ID NO: 15236 - RNA, 31 nt, synthetic construct
  source 1..31: mol_type = other RNA
tctctcccaggataggcacaaacacgcacct

SEQ ID NO: 15237 - RNA, 41 nt, synthetic construct
  source 1..41: mol_type = other RNA
gcacaaacacacacctcaaagcggttccgtcgcagtagatt

SEQ ID NO: 15238 - RNA, 31 nt, synthetic construct
  source 1..31: mol_type = other RNA
tctcttccaggacaggcagaaacacacacct

SEQ ID NO: 15239 - RNA, 41 nt, synthetic construct
  source 1..41: mol_type = other RNA
gcacaaacacacacctcaaagaggttctggcccagtagatt

SEQ ID NO: 15240 - RNA, 41 nt, synthetic construct
  source 1..41: mol_type = other RNA
gcacaaacacacacctcataacggtaccgtcccagtagatt

SEQ ID NO: 15241 - RNA, 41 nt, synthetic construct
  source 1..41: mol_type = other RNA
gtctctccccggacaggctcaaacgcgcacttcaaagctgt

SEQ ID NO: 15242 - RNA, 41 nt, synthetic construct
  source 1..41: mol_type = other RNA
gcgccggtcactcccaggaaaggcacgaacacacacctcaa

SEQ ID NO: 15243 - RNA, 41 nt, synthetic construct
  source 1..41: mol_type = other RNA
gcgccggtctcttccaggacaggcccaaatgcgcacctcaa

SEQ ID NO: 15244 - RNA, 31 nt, synthetic construct
  source 1..31: mol_type = other RNA
tctctcccaggaacagcacagacacgcacct

SEQ ID NO: 15245 - RNA, 41 nt, synthetic construct
  source 1..41: mol_type = other RNA
acaggcacaaacacacacgtcaaagcggtaccgtcccagta

SEQ ID NO: 15246 - RNA, 41 nt, synthetic construct
  source 1..41: mol_type = other RNA
gcgccggtcaagcccaggaaaggcaggaacacgcacctcaa

SEQ ID NO: 15247 - RNA, 32 nt, synthetic construct
  source 1..32: mol_type = other RNA
tctctcccaggatcaggcacaaacacacacct

SEQ ID NO: 15248 - RNA, 41 nt, synthetic construct
  source 1..41: mol_type = other RNA
gtctctcccaggaaacgcacgaacacgcgtctcaaagctgt

SEQ ID NO: 15249 - RNA, 42 nt, synthetic construct
  source 1..42: mol_type = other RNA
gtctctcccaggatcaggcacaaacacacatctcaaagctgt

SEQ ID NO: 15250 - RNA, 41 nt, synthetic construct
  source 1..41: mol_type = other RNA
gcgccggtctctcccaggatgggcacaaacacacacctcaa

SEQ ID NO: 15251 - RNA, 41 nt, synthetic construct
  source 1..41: mol_type = other RNA
acaggcacacacacacacatcaaagcggttccgtcccagta

SEQ ID NO: 15252 - RNA, 41 nt, synthetic construct
  source 1..41: mol_type = other RNA
acaggcacgaacacactcctcaaaacggttccgtcccagta

SEQ ID NO: 15253 - RNA, 41 nt, synthetic construct
  source 1..41: mol_type = other RNA
gtctctcccaggaaaggcacgaacacacatctcaaagctgt

SEQ ID NO: 15254 - RNA, 41 nt, synthetic construct
  source 1..41: mol_type = other RNA
gcgccggtctcttcaaggacaggcagaaatgcgcacctcaa

SEQ ID NO: 15255 - RNA, 41 nt, synthetic construct
  source 1..41: mol_type = other RNA
gtctctcccaggacaggcacaaacgcacaccttaaagctgt

SEQ ID NO: 15256 - RNA, 31 nt, synthetic construct
  source 1..31: mol_type = other RNA
tctctccccggacaggtatacacacgcacct

SEQ ID NO: 15257 - RNA, 41 nt, synthetic construct
  source 1..41: mol_type = other RNA
acaggcacaaatacgcacctcaaagcggttccgtcccagta

SEQ ID NO: 15258 - RNA, 41 nt, synthetic construct
  source 1..41: mol_type = other RNA
gtctctcccaggaaaggcacgaacacacacctcaaagctgt

SEQ ID NO: 15259 - RNA, 41 nt, synthetic construct
  source 1..41: mol_type = other RNA
gtctctcccgggaccggcacacacacacacatcaaagctgt

SEQ ID NO: 15260 - RNA, 31 nt, synthetic construct
  source 1..31: mol_type = other RNA
tctctcccagggcaggcacacacacgcacct

SEQ ID NO: 15261 - RNA, 41 nt, synthetic construct
  source 1..41: mol_type = other RNA
gcacaaacacacacctaaaagcggttccgtcccagtagatt

SEQ ID NO: 15262 - RNA, 41 nt, synthetic construct
  source 1..41: mol_type = other RNA
gtctctcccaggaaaggcacgaacacacacccaaaagctgt

SEQ ID NO: 15263 - RNA, 41 nt, synthetic construct
  source 1..41: mol_type = other RNA
gcgccggtctatcccaggacaggcacaaacacgcacctcaa

SEQ ID NO: 15264 - RNA, 31 nt, synthetic construct
  source 1..31: mol_type = other RNA
tctctcccaggacaggcagaatcacacacct

SEQ ID NO: 15265 - RNA, 41 nt, synthetic construct
  source 1..41: mol_type = other RNA
gtctctcccaggacaggcccaaacacgcacctcaaagctgt

SEQ ID NO: 15266 - RNA, 31 nt, synthetic construct
  source 1..31: mol_type = other RNA
tctctcccaggacaggcacaaacacgcacct

SEQ ID NO: 15267 - RNA, 31 nt, synthetic construct
  source 1..31: mol_type = other RNA
tctctaccaggacagggtcaaacacgcacct

SEQ ID NO: 15268 - RNA, 41 nt, synthetic construct
  source 1..41: mol_type = other RNA
gcacaaacacgcacatcaaggcggttccgtcccagtagatt

SEQ ID NO: 15269 - RNA, 31 nt, synthetic construct
  source 1..31: mol_type = other RNA
tctctcccaggacaggcacacacacgcacct

SEQ ID NO: 15270 - RNA, 41 nt, synthetic construct
  source 1..41: mol_type = other RNA
acaggcacaaacacacacctcaaagcggttcagtcccagta

SEQ ID NO: 15271 - RNA, 41 nt, synthetic construct
  source 1..41: mol_type = other RNA
gtctctcccgggataggcacaaatacacacctaaaagctgt

SEQ ID NO: 15272 - RNA, 31 nt, synthetic construct
  source 1..31: mol_type = other RNA
tctcttcgaggaaaggcaggaacacgcacct

SEQ ID NO: 15273 - RNA, 31 nt, synthetic construct
  source 1..31: mol_type = other RNA
tctctcccaggacagctacaaacacacacct

SEQ ID NO: 15274 - RNA, 41 nt, synthetic construct
  source 1..41: mol_type = other RNA
gtctctccaaggacaggcggaatcacgcccctgaaagctgt

SEQ ID NO: 15275 - RNA, 41 nt, synthetic construct
  source 1..41: mol_type = other RNA
gtctctcccaggacaggcactaacacacacctcaaagctgt

SEQ ID NO: 15276 - RNA, 41 nt, synthetic construct
  source 1..41: mol_type = other RNA
acaggcacacacacacacctaaaagcggttccgtcccagta

SEQ ID NO: 15277 - RNA, 41 nt, synthetic construct
  source 1..41: mol_type = other RNA
gcgccggtatctaccaggccatgcagaaacacacacctcaa

SEQ ID NO: 15278 - RNA, 41 nt, synthetic construct
  source 1..41: mol_type = other RNA
acaggcactaacacacacctcaaggcggttccgtcccagta

SEQ ID NO: 15279 - RNA, 31 nt, synthetic construct
  source 1..31: mol_type = other RNA
tctcttccaggacaggcgcacacacgcacct

SEQ ID NO: 15280 - RNA, 41 nt, synthetic construct
  source 1..41: mol_type = other RNA
gtctctcccaggaaaggcacgaacacgcgcctcaaagctgt

SEQ ID NO: 15281 - RNA, 31 nt, synthetic construct
  source 1..31: mol_type = other RNA
tctctcccaggacaggcaaaaacacacacct

SEQ ID NO: 15282 - RNA, 41 nt, synthetic construct
  source 1..41: mol_type = other RNA
acaggcacaaacacgcacctcagagcggttccgtcccagta

SEQ ID NO: 15283 - RNA, 31 nt, synthetic construct
  source 1..31: mol_type = other RNA
tctctcccaggataggcacacacacacacct

SEQ ID NO: 15284 - RNA, 41 nt, synthetic construct
  source 1..41: mol_type = other RNA
gtctctcccaggaaaggtacgaacacgcacctcaaagctgt

SEQ ID NO: 15285 - RNA, 31 nt, synthetic construct
  source 1..31: mol_type = other RNA
tctctccaaggacaggaccaaacacgcacct

SEQ ID NO: 15286 - RNA, 41 nt, synthetic construct
  source 1..41: mol_type = other RNA
gcacaaacacactcctcaaggcggttaagtcacagtagatt

SEQ ID NO: 15287 - RNA, 41 nt, synthetic construct
  source 1..41: mol_type = other RNA
acaggcacaaacacgcacctcaaagcggttccgtcccagta

SEQ ID NO: 15288 - RNA, 41 nt, synthetic construct
  source 1..41: mol_type = other RNA
gcacaaacacacacctcaaagcgattccgtaccagtagatt

SEQ ID NO: 15289 - RNA, 31 nt, synthetic construct
  source 1..31: mol_type = other RNA
tctctaccaggaaaggcaggaacacgcacct

SEQ ID NO: 15290 - RNA, 31 nt, synthetic construct
  source 1..31: mol_type = other RNA
tctctcccaggactggtgcaaacacgcacct

SEQ ID NO: 15291 - RNA, 31 nt, synthetic construct
  source 1..31: mol_type = other RNA
tctctcccaggtcaggcacaaacacgcacct

SEQ ID NO: 15292 - RNA, 41 nt, synthetic construct
  source 1..41: mol_type = other RNA
cccaggacaggcacaaacacgctcctcaaagcggttccgtc

SEQ ID NO: 15293 - RNA, 41 nt, synthetic construct
  source 1..41: mol_type = other RNA
gtctctccaaggaaacgcaacaacacgcacctaaaagctgt

SEQ ID NO: 15294 - RNA, 41 nt, synthetic construct
  source 1..41: mol_type = other RNA
gcgccggtctatcccaggacaggcacaaacgcacacctcaa

SEQ ID NO: 15295 - RNA, 41 nt, synthetic construct
  source 1..41: mol_type = other RNA
gcacaaacacacccctcaaagtggtccagtcccagtagatt

SEQ ID NO: 15296 - RNA, 31 nt, synthetic construct
  source 1..31: mol_type = other RNA
tctctcccaggacagacacaaacacacacct

SEQ ID NO: 15297 - RNA, 41 nt, synthetic construct
  source 1..41: mol_type = other RNA
acaggcactaacacacacatcaaggcggttccgtcccagta

SEQ ID NO: 15298 - RNA, 41 nt, synthetic construct
  source 1..41: mol_type = other RNA
gcgccggtctctccccggacaggctcaaacgcgcacctcaa

SEQ ID NO: 15299 - RNA, 41 nt, synthetic construct
  source 1..41: mol_type = other RNA
gcacaaacacacacgtcaaagcggtaccgtcccagtagatt

SEQ ID NO: 15300 - RNA, 41 nt, synthetic construct
  source 1..41: mol_type = other RNA
acaggcacgaacacacacctcataacggtaccgtcccagta

SEQ ID NO: 15301 - RNA, 41 nt, synthetic construct
  source 1..41: mol_type = other RNA
cccaggacaggcacaaatacgcacctcaaagcggttccgtc

SEQ ID NO: 15302 - RNA, 41 nt, synthetic construct
  source 1..41: mol_type = other RNA
gtctctcccaggaatggcgcgaacacactcctcaaagctgt

SEQ ID NO: 15303 - RNA, 41 nt, synthetic construct
  source 1..41: mol_type = other RNA
cccaggaccggcacacacacacacatcaaagcggttccgtc

SEQ ID NO: 15304 - RNA, 40 nt, synthetic construct
  source 1..40: mol_type = other RNA
gtctctcccaggaaaggcacgaacacacacccaaagctgt

SEQ ID NO: 15305 - RNA, 41 nt, synthetic construct
  source 1..41: mol_type = other RNA
acaggcacgaacacactcctcaaggcggttaagtcccagta

SEQ ID NO: 15306 - RNA, 41 nt, synthetic construct
  source 1..41: mol_type = other RNA
gcgccggtctctcccaggacaggcacaaatacgcacctcaa

SEQ ID NO: 15307 - RNA, 41 nt, synthetic construct
  source 1..41: mol_type = other RNA
gcgccggtcacacccagacaaggtacgcacacgcacctcaa

SEQ ID NO: 15308 - RNA, 41 nt, synthetic construct
  source 1..41: mol_type = other RNA
gcgccggtctctccccggataggcacaaacacgcacctcaa

SEQ ID NO: 15309 - RNA, 31 nt, synthetic construct
  source 1..31: mol_type = other RNA
tctctcccaggatgggcacaaacacacacct

SEQ ID NO: 15310 - RNA, 31 nt, synthetic construct
  source 1..31: mol_type = other RNA
tctctcccaggacaggcacaaatacgcacct

SEQ ID NO: 15311 - RNA, 41 nt, synthetic construct
  source 1..41: mol_type = other RNA
gcgccggtatctcccaggacaggcacaaacacacacctcaa

SEQ ID NO: 15312 - RNA, 41 nt, synthetic construct
  source 1..41: mol_type = other RNA
gtctctccaaggccaggcacggacacgcgtctcaaagctgt

SEQ ID NO: 15313 - RNA, 41 nt, synthetic construct
  source 1..41: mol_type = other RNA
acaggcacacacacgcacctcaaagcggttccgtcccagta

SEQ ID NO: 15314 - RNA, 31 nt, synthetic construct
  source 1..31: mol_type = other RNA
tctctaccaggacaggcccaaacacgcacct

SEQ ID NO: 15315 - RNA, 41 nt, synthetic construct
  source 1..41: mol_type = other RNA
cccaggacaggcaggaacacgcacctcaaaacggttccgtc

SEQ ID NO: 15316 - RNA, 41 nt, synthetic construct
  source 1..41: mol_type = other RNA
gtctctcccaggacaggcagaaacgcgcacctcaaagctgt

SEQ ID NO: 15317 - RNA, 41 nt, synthetic construct
  source 1..41: mol_type = other RNA
gcacaaacacacacctcaaggtggttccgacccagtagatt

SEQ ID NO: 15318 - RNA, 41 nt, synthetic construct
  source 1..41: mol_type = other RNA
cccaggacatgcagaaacacacacctcaaggtggttccgtc

SEQ ID NO: 15319 - RNA, 41 nt, synthetic construct
  source 1..41: mol_type = other RNA
gcgccggtcactccgaggaaaggctcgaccacacacctcaa

SEQ ID NO: 15320 - RNA, 41 nt, synthetic construct
  source 1..41: mol_type = other RNA
gcacaaacacacacatcaaagcggttccgtaccagtagatt

SEQ ID NO: 15321 - RNA, 41 nt, synthetic construct
  source 1..41: mol_type = other RNA
gcacaaacacgcacctcaaagcggttccgtcccagtagatt

SEQ ID NO: 15322 - RNA, 39 nt, synthetic construct
  source 1..39: mol_type = other RNA
gcgccggtctcccaggaatggcgcgaacacacacctcaa

SEQ ID NO: 15323 - RNA, 41 nt, synthetic construct
  source 1..41: mol_type = other RNA
gcgccggtctctcccagggctcgcacaaacgcgcacctcaa

SEQ ID NO: 15324 - RNA, 41 nt, synthetic construct
  source 1..41: mol_type = other RNA
gcgccggtttcccccaggataggcacaaacacgcacctcaa

SEQ ID NO: 15325 - RNA, 41 nt, synthetic construct
  source 1..41: mol_type = other RNA
cccaggacaggcacgaacacgcacccaaaagtggttccgtc

SEQ ID NO: 15326 - RNA, 41 nt, synthetic construct
  source 1..41: mol_type = other RNA
gtctctcccaggaaagacactaacacacacttcaaagctgt

SEQ ID NO: 15327 - RNA, 41 nt, synthetic construct
  source 1..41: mol_type = other RNA
cccaggacagctacaaacacacacatcaaagcggttccgtc

SEQ ID NO: 15328 - RNA, 41 nt, synthetic construct
  source 1..41: mol_type = other RNA
gtctctcccacgacgggcgcaaaaacgccgctcaaagctgt

SEQ ID NO: 15329 - RNA, 41 nt, synthetic construct
  source 1..41: mol_type = other RNA
cccaggacaggcacaaacacgcacgcaaaagcggttccgtc

SEQ ID NO: 15330 - RNA, 31 nt, synthetic construct
  source 1..31: mol_type = other RNA
tctcttccaggaagggcccaaacacgcacct

SEQ ID NO: 15331 - RNA, 41 nt, synthetic construct
  source 1..41: mol_type = other RNA
acaggcacgaccacacgtctcaaggcggttccgtcccagta

SEQ ID NO: 15332 - RNA, 31 nt, synthetic construct
  source 1..31: mol_type = other RNA
tctctaccaggactggcgcaaacacgcacct

SEQ ID NO: 15333 - RNA, 41 nt, synthetic construct
  source 1..41: mol_type = other RNA
gtctctcccaggacaggcacacacacgcacctcaaagctgt

SEQ ID NO: 15334 - RNA, 41 nt, synthetic construct
  source 1..41: mol_type = other RNA
acaggcaccaacacgcacctaaaagtggttccgtcccagta

SEQ ID NO: 15335 - RNA, 41 nt, synthetic construct
  source 1..41: mol_type = other RNA
gcacaaacacgcagctcaaagcggttcagtcccagtagatt

SEQ ID NO: 15336 - RNA, 41 nt, synthetic construct
  source 1..41: mol_type = other RNA
gtctctcccaggacaggtataaacgcgcacttcaaagctgt

SEQ ID NO: 15337 - RNA, 41 nt, synthetic construct
  source 1..41: mol_type = other RNA
gcgccggtcgaacccaggaaaggcaaaaacacgcacctcaa

SEQ ID NO: 15338 - RNA, 31 nt, synthetic construct
  source 1..31: mol_type = other RNA
tctctcctaggacagacatgaacacacacct

SEQ ID NO: 15339 - RNA, 42 nt, synthetic construct
  source 1..42: mol_type = other RNA
gcgccggtctccccccaggacaggcccaaatgcgcacctcaa

SEQ ID NO: 15340 - RNA, 41 nt, synthetic construct
  source 1..41: mol_type = other RNA
gcgccggtctctcccaggacaggcccaaacacgcacctcaa

SEQ ID NO: 15341 - RNA, 45 nt, synthetic construct
  source 1..45: mol_type = other RNA
acaggcacaaatacgcacctcatcaatccaggttccgtcccagta

SEQ ID NO: 15342 - RNA, 41 nt, synthetic construct
  source 1..41: mol_type = other RNA
cccaggacaggcacaaacacgcaccttaaagcggttccgtc

SEQ ID NO: 15343 - RNA, 41 nt, synthetic construct
  source 1..41: mol_type = other RNA
gtctctcccaggacaggcacaaatgcgcacctcaaagctgt

SEQ ID NO: 15344 - RNA, 41 nt, synthetic construct
  source 1..41: mol_type = other RNA
acaggcacacacacgcacgtcaaagcggttccgtcccagta

SEQ ID NO: 15345 - RNA, 41 nt, synthetic construct
  source 1..41: mol_type = other RNA
gtctctcccaggacaggcaagaacgcgcacctcaaagctgt

SEQ ID NO: 15346 - RNA, 31 nt, synthetic construct
  source 1..31: mol_type = other RNA
tctctccaaggccaggcacggacacgcacct

SEQ ID NO: 15347 - RNA, 41 nt, synthetic construct
  source 1..41: mol_type = other RNA
gtctctcccaggacaggcccaaatgcgcatctcaaagctgt

SEQ ID NO: 15348 - RNA, 41 nt, synthetic construct
  source 1..41: mol_type = other RNA
gcacaaacacacacctcaaagcggttccgtccaagtagatt

SEQ ID NO: 15349 - RNA, 41 nt, synthetic construct
  source 1..41: mol_type = other RNA
gtctctcccgggacagaaccaaacacacgtctcaaagctgt

SEQ ID NO: 15350 - RNA, 31 nt, synthetic construct
  source 1..31: mol_type = other RNA
tctctcccagtacagtcacaaacacacacct

SEQ ID NO: 15351 - RNA, 41 nt, synthetic construct
  source 1..41: mol_type = other RNA
cccaggacaggcacacacacacacctaaaagcggttccgtc

SEQ ID NO: 15352 - RNA, 41 nt, synthetic construct
  source 1..41: mol_type = other RNA
acaggcacaaatacacacctaaaagcggttccgtcccagta

SEQ ID NO: 15353 - RNA, 31 nt, synthetic construct
  source 1..31: mol_type = other RNA
tctctggcaggacaggcacaaacacgcacct

SEQ ID NO: 15354 - RNA, 41 nt, synthetic construct
  source 1..41: mol_type = other RNA
gtctctcctaggacagacatgaacacactcctcaaagctgt

SEQ ID NO: 15355 - RNA, 41 nt, synthetic construct
  source 1..41: mol_type = other RNA
acaggcacaaacacgcacctcaaagcggttccatcccagta

SEQ ID NO: 15356 - RNA, 41 nt, synthetic construct
  source 1..41: mol_type = other RNA
acaggcacaatcacacccctcaaagtggtccagtcccagta

SEQ ID NO: 15357 - RNA, 41 nt, synthetic construct
  source 1..41: mol_type = other RNA
cccaggacaggcagaaacacgcccctcaaagaggttccgtc

SEQ ID NO: 15358 - RNA, 41 nt, synthetic construct
  source 1..41: mol_type = other RNA
cccaggacacgcaacaacacgcacctaaaagtggttccgtc

SEQ ID NO: 15359 - RNA, 41 nt, synthetic construct
  source 1..41: mol_type = other RNA
gtctctccgagggcaggcacagacacccacctcaaagctgt

SEQ ID NO: 15360 - RNA, 31 nt, synthetic construct
  source 1..31: mol_type = other RNA
tctctcccaggaaaggcacgaacacacacct

SEQ ID NO: 15361 - RNA, 31 nt, synthetic construct
  source 1..31: mol_type = other RNA
tctctaccaggaaacgcacgaacacgcacct

SEQ ID NO: 15362 - RNA, 31 nt, synthetic construct
  source 1..31: mol_type = other RNA
tctctcccaggacaggcaagaacgcgcacct

SEQ ID NO: 15363 - RNA, 31 nt, synthetic construct
  source 1..31: mol_type = other RNA
tctctcccagaccaggtaaccacacgcacct

SEQ ID NO: 15364 - RNA, 41 nt, synthetic construct
  source 1..41: mol_type = other RNA
gcacaaacacgcacctcagagcggttccgtcccagtagatt

SEQ ID NO: 15365 - RNA, 41 nt, synthetic construct
  source 1..41: mol_type = other RNA
gcacaaacacacacccaaaagtggttccgtcccagtagatt

SEQ ID NO: 15366 - RNA, 41 nt, synthetic construct
  source 1..41: mol_type = other RNA
acaggcactaacacacacttcagagcgcttccgtcccagta

SEQ ID NO: 15367 - RNA, 31 nt, synthetic construct
  source 1..31: mol_type = other RNA
tctctcccaggacaggcagaaacgcgcacct

SEQ ID NO: 15368 - RNA, 41 nt, synthetic construct
  source 1..41: mol_type = other RNA
gtctctccccggataggcacaaacacgcacgcaaaagctgt

SEQ ID NO: 15369 - RNA, 31 nt, synthetic construct
  source 1..31: mol_type = other RNA
tctctccgaggaaaggctcgaccacacacct

SEQ ID NO: 15370 - RNA, 41 nt, synthetic construct
  source 1..41: mol_type = other RNA
gcacaaacacgcacctcaaatcggttccgtcccagtagatt

SEQ ID NO: 15371 - RNA, 43 nt, synthetic construct
  source 1..43: mol_type = other RNA
cccaggacaggtctaagcacaccaaccgtaacgcggttccgtc

SEQ ID NO: 15372 - RNA, 41 nt, synthetic construct
  source 1..41: mol_type = other RNA
gcgccggtctctcccaggacaggcacaaacacgcacctcaa

SEQ ID NO: 15373 - RNA, 31 nt, synthetic construct
  source 1..31: mol_type = other RNA
tctcttctaggcaaggcacgaacacgcacct

SEQ ID NO: 15374 - RNA, 41 nt, synthetic construct
  source 1..41: mol_type = other RNA
cccaggacaggcacaaacacacacgtcaaagcggttccgtc

SEQ ID NO: 15375 - RNA, 41 nt, synthetic construct
  source 1..41: mol_type = other RNA
acaggcacaaacacgcaccttaaagcggttccgtcccagta

SEQ ID NO: 15376 - RNA, 31 nt, synthetic construct
  source 1..31: mol_type = other RNA
tctctcccacgacgggcgcaaaaacgcacct

SEQ ID NO: 15377 - RNA, 31 nt, synthetic construct
  source 1..31: mol_type = other RNA
tctcttccaggacaggcgcaaacacgcacct

SEQ ID NO: 15378 - RNA, 31 nt, synthetic construct
  source 1..31: mol_type = other RNA
tctctcccaggacaggcagatacacacacct

SEQ ID NO: 15379 - RNA, 41 nt, synthetic construct
  source 1..41: mol_type = other RNA
gtctctccccagaaaggcactaacacacacatcaaagctgt

SEQ ID NO: 15380 - RNA, 41 nt, synthetic construct
  source 1..41: mol_type = other RNA
gcacaaacgcacaccttaaagcggttccgtcctagtagatt

SEQ ID NO: 15381 - RNA, 41 nt, synthetic construct
  source 1..41: mol_type = other RNA
cccaggacaggcacgaacacgcacctcaaagcggttccgtc

SEQ ID NO: 15382 - RNA, 31 nt, synthetic construct
  source 1..31: mol_type = other RNA
tctcttccaggacgggcacaaacacacacct

SEQ ID NO: 15383 - RNA, 31 nt, synthetic construct
  source 1..31: mol_type = other RNA
tctctcccaggacaggcccaaacacgcacct

SEQ ID NO: 15384 - RNA, 31 nt, synthetic construct
  source 1..31: mol_type = other RNA
tctctaccaggacaggcactaacacacacct

SEQ ID NO: 15385 - RNA, 40 nt, synthetic construct
  source 1..40: mol_type = other RNA
cccaggacaggcgcaaacacgcaactcaagtggttccgtc

SEQ ID NO: 15386 - RNA, 31 nt, synthetic construct
  source 1..31: mol_type = other RNA
tctctcccgggataggcacaaatacacacct

SEQ ID NO: 15387 - RNA, 41 nt, synthetic construct
  source 1..41: mol_type = other RNA
gcacaaacacgcacctcaaagtggttccgtcccagtagatt

SEQ ID NO: 15388 - RNA, 41 nt, synthetic construct
  source 1..41: mol_type = other RNA
cccaggacaggcacgaacacgcacctcaaagtggttccgtc

SEQ ID NO: 15389 - RNA, 31 nt, synthetic construct
  source 1..31: mol_type = other RNA
tctctccccggacaggctcaaacgcgcacct

SEQ ID NO: 15390 - RNA, 41 nt, synthetic construct
  source 1..41: mol_type = other RNA
gcgccggtttcgcccgggataggcacaaatacacacctcaa

SEQ ID NO: 15391 - RNA, 41 nt, synthetic construct
  source 1..41: mol_type = other RNA
acaggcacaaacacacagcccaaggcgctaccgtcccagta

SEQ ID NO: 15392 - RNA, 41 nt, synthetic construct
  source 1..41: mol_type = other RNA
acaggcacaaacacgctcctcaaaacggatccgtcccagta

SEQ ID NO: 15393 - RNA, 41 nt, synthetic construct
  source 1..41: mol_type = other RNA
gcacaaacacacagcccaaggcgctaccgtcccagtagatt

SEQ ID NO: 15394 - RNA, 41 nt, synthetic construct
  source 1..41: mol_type = other RNA
cccaggacaggcacaaacacacatctcagagcggttccgtc

SEQ ID NO: 15395 - RNA, 41 nt, synthetic construct
  source 1..41: mol_type = other RNA
cccaggacaggcagaatcacacccctcaaagtggttccgtc

SEQ ID NO: 15396 - RNA, 41 nt, synthetic construct
  source 1..41: mol_type = other RNA
gcgccggtcactcccaataaaggcacgaacacgcacctcaa

SEQ ID NO: 15397 - RNA, 31 nt, synthetic construct
  source 1..31: mol_type = other RNA
tctctcccaggacaggcacaaacgcacacct

SEQ ID NO: 15398 - RNA, 31 nt, synthetic construct
  source 1..31: mol_type = other RNA
tctctcccaagacaggcacaaatgcacacct

SEQ ID NO: 15399 - RNA, 41 nt, synthetic construct
  source 1..41: mol_type = other RNA
cccaggacaggcagaaacacgcacctcagagcggttccgtc

SEQ ID NO: 15400 - RNA, 41 nt, synthetic construct
  source 1..41: mol_type = other RNA
cccaggacagggacaaacacgcgcatcaaggcggttccgtc

SEQ ID NO: 15401 - RNA, 41 nt, synthetic construct
  source 1..41: mol_type = other RNA
acaggcacgaacacacacccaaaagtggttccgtcccagta

SEQ ID NO: 15402 - RNA, 41 nt, synthetic construct
  source 1..41: mol_type = other RNA
cccaggacaggcagatacacacacctcaaagaggttccgtc

SEQ ID NO: 15403 - RNA, 41 nt, synthetic construct
  source 1..41: mol_type = other RNA
cccaggacaggcacaaacacacacctcaaagcggttccgtc

SEQ ID NO: 15404 - RNA, 39 nt, synthetic construct
  source 1..39: mol_type = other RNA
gtctctcccaggacccacagacacacacctcaaagctgt

SEQ ID NO: 15405 - RNA, 41 nt, synthetic construct
  source 1..41: mol_type = other RNA
acaggcacgaacacgcatctcaaaaaggttccatcccagta

SEQ ID NO: 15406 - RNA, 31 nt, synthetic construct
  source 1..31: mol_type = other RNA
tctctcccaggaatggcgcgaacacacacct

SEQ ID NO: 15407 - RNA, 41 nt, synthetic construct
  source 1..41: mol_type = other RNA
cccaggacagacacaaacacacacctcaaagcggttccgtc

SEQ ID NO: 15408 - RNA, 41 nt, synthetic construct
  source 1..41: mol_type = other RNA
acaggcacgaacacgcacctcaaagcggttccgtcccagta

SEQ ID NO: 15409 - RNA, 44 nt, synthetic construct
  source 1..44: mol_type = other RNA
gcacaaacacgcacctcaattccacggatccgtcatagtagatt

SEQ ID NO: 15410 - RNA, 41 nt, synthetic construct
  source 1..41: mol_type = other RNA
gcacaaacacgcacctcaaagcggttccggtccagtagatt

SEQ ID NO: 15411 - RNA, 41 nt, synthetic construct
  source 1..41: mol_type = other RNA
cccaggactggcgcaaacacgctcctcaaaacggttccgtc

SEQ ID NO: 15412 - RNA, 41 nt, synthetic construct
  source 1..41: mol_type = other RNA
gtctctcctaggcaaggcacgaacacgcacctcaaagctgt

SEQ ID NO: 15413 - RNA, 41 nt, synthetic construct
  source 1..41: mol_type = other RNA
cccaggacaggcacgaacacgcacctcaaatcggttccgtc

SEQ ID NO: 15414 - RNA, 29 nt, synthetic construct
  source 1..29: mol_type = other RNA
tctctccaaggaaccacaaacacgcacct

SEQ ID NO: 15415 - RNA, 41 nt, synthetic construct
  source 1..41: mol_type = other RNA
cccaggacagacatgaacacactcctcaaggcggttccgtc

SEQ ID NO: 15416 - RNA, 41 nt, synthetic construct
  source 1..41: mol_type = other RNA
acaggcacgaacacgctcctcaaagcggttccgtcccagta

SEQ ID NO: 15417 - RNA, 31 nt, synthetic construct
  source 1..31: mol_type = other RNA
tctcttccaggaaaggcacgaacacacacct

SEQ ID NO: 15418 - RNA, 41 nt, synthetic construct
  source 1..41: mol_type = other RNA
gcacaaacacgcaccttaaagcggttccgtcccagtagatt

SEQ ID NO: 15419 - RNA, 41 nt, synthetic construct
  source 1..41: mol_type = other RNA
gcacaaacacgctcctcaaaacggatccgtcccagtagatt

SEQ ID NO: 15420 - RNA, 41 nt, synthetic construct
  source 1..41: mol_type = other RNA
gtctctccaaggacaggcagaaatgcgcacctcaaagctgt

SEQ ID NO: 15421 - RNA, 41 nt, synthetic construct
  source 1..41: mol_type = other RNA
gcacaaacacgcacgtcaaagcggttccgtctcagtagatt

SEQ ID NO: 15422 - RNA, 31 nt, synthetic construct
  source 1..31: mol_type = other RNA
tctctcccaggacaggcacaaacacacacct

SEQ ID NO: 15423 - RNA, 41 nt, synthetic construct
  source 1..41: mol_type = other RNA
acaggcacaaacacgcacatagaagcggttccgtcccagta

SEQ ID NO: 15424 - RNA, 41 nt, synthetic construct
  source 1..41: mol_type = other RNA
cccaggacacgcacgaacacgcgtctcaaagcggttccgtc

SEQ ID NO: 15425 - RNA, 31 nt, synthetic construct
  source 1..31: mol_type = other RNA
ggacagggtcaaacacggacataaacgctgt

SEQ ID NO: 15426 - RNA, 41 nt, synthetic construct
  source 1..41: mol_type = other RNA
acaggcacgaacacgcacctcaaagtggttccgtcccagta

SEQ ID NO: 15427 - RNA, 41 nt, synthetic construct
  source 1..41: mol_type = other RNA
gtctctccccggactggctcaaacgcacacctcaaagctgt

SEQ ID NO: 15428 - RNA, 41 nt, synthetic construct
  source 1..41: mol_type = other RNA
cccaggacaggcactaacacacacatcaaggcggttccgtc

SEQ ID NO: 15429 - RNA, 31 nt, synthetic construct
  source 1..31: mol_type = other RNA
tctctccaaggaaacgcaacaacacgcacct

SEQ ID NO: 15430 - RNA, 41 nt, synthetic construct
  source 1..41: mol_type = other RNA
cccaggacaggcaggaacacgcacctcaaagtggttccgtc

SEQ ID NO: 15431 - RNA, 31 nt, synthetic construct
  source 1..31: mol_type = other RNA
tctctcccagacaaggtacgcacacgcacct

SEQ ID NO: 15432 - RNA, 41 nt, synthetic construct
  source 1..41: mol_type = other RNA
gcacaaacacgcgtctcaaagcggttccgtcccagtagatt

SEQ ID NO: 15433 - RNA, 41 nt, synthetic construct
  source 1..41: mol_type = other RNA
cccaggacaggcccaaacacgcacctcaaagcggttccgtc

SEQ ID NO: 15434 - RNA, 41 nt, synthetic construct
  source 1..41: mol_type = other RNA
gtctctccgaggaaaggctcgaccacacgtctcaaagctgt

SEQ ID NO: 15435 - RNA, 41 nt, synthetic construct
  source 1..41: mol_type = other RNA
acaggcacaaacacgcacccaaaagcggttccgtcccagta

SEQ ID NO: 15436 - RNA, 41 nt, synthetic construct
  source 1..41: mol_type = other RNA
acaggcacaaacacgcacttcaacgcggttccgtcccagta

SEQ ID NO: 15437 - RNA, 41 nt, synthetic construct
  source 1..41: mol_type = other RNA
gcgccggtctctcccaggacaggcacaaacacacacctcaa

SEQ ID NO: 15438 - RNA, 41 nt, synthetic construct
  source 1..41: mol_type = other RNA
cccaggacaggcacgaacacgcgcctcaaagcggttccgtc

SEQ ID NO: 15439 - RNA, 41 nt, synthetic construct
  source 1..41: mol_type = other RNA
gtctctcccaagacaggcacaaatgcacaccttaaagctgt

SEQ ID NO: 15440 - RNA, 41 nt, synthetic construct
  source 1..41: mol_type = other RNA
cccaggacaggcactaacacacacctcaaggcggttccgtc

SEQ ID NO: 15441 - RNA, 41 nt, synthetic construct
  source 1..41: mol_type = other RNA
cccaggacaggcggaatcacgcccctgaaaggggttccgtc

SEQ ID NO: 15442 - RNA, 41 nt, synthetic construct
  source 1..41: mol_type = other RNA
gcgccggtctcacccagggcaggggcaaatgcgcacctcaa

SEQ ID NO: 15443 - RNA, 41 nt, synthetic construct
  source 1..41: mol_type = other RNA
gtctctcccgggacaggcagaaatgcgcacctcaaagctgt

SEQ ID NO: 15444 - RNA, 31 nt, synthetic construct
  source 1..31: mol_type = other RNA
caaacacacacatcaaagcggttccgtccca

SEQ ID NO: 15445 - RNA, 41 nt, synthetic construct
  source 1..41: mol_type = other RNA
cccaggacaggtacgaacacgcacctcaaaacggttccgtc

SEQ ID NO: 15446 - RNA, 41 nt, synthetic construct
  source 1..41: mol_type = other RNA
acaggcacccacacgcacctccgagaggtaccgtcccagta

SEQ ID NO: 15447 - RNA, 41 nt, synthetic construct
  source 1..41: mol_type = other RNA
cccaggacagacactaacacacacttcagagcggttccgtc

SEQ ID NO: 15448 - RNA, 40 nt, synthetic construct
  source 1..40: mol_type = other RNA
cccaggaccggacaaacacgcatctcgaagcggttccgtc

SEQ ID NO: 15449 - RNA, 42 nt, synthetic construct
  source 1..42: mol_type = other RNA
gcgccggtctctcccaggacaggcgccatctccgcacctcaa

SEQ ID NO: 15450 - RNA, 41 nt, synthetic construct
  source 1..41: mol_type = other RNA
acaggcacgaacacgcacctcaaaacggttctgtcccagta

SEQ ID NO: 15451 - RNA, 40 nt, synthetic construct
  source 1..40: mol_type = other RNA
gcacaaacacgcctctcacagggttccgtaccagtagatt

SEQ ID NO: 15452 - RNA, 45 nt, synthetic construct
  source 1..45: mol_type = other RNA
gcacaaacacgcacctcatcaatccaggttccgttccagtagatt

SEQ ID NO: 15453 - RNA, 41 nt, synthetic construct
  source 1..41: mol_type = other RNA
gcacaaacacgcatctcaaaaaggttccatcccagtagatt

SEQ ID NO: 15454 - RNA, 41 nt, synthetic construct
  source 1..41: mol_type = other RNA
cccaggacaggcaccaatacgcacatcaaagcggttccgtc

SEQ ID NO: 15455 - RNA, 41 nt, synthetic construct
  source 1..41: mol_type = other RNA
cccaggactggcgcgaacacactcctcaaaacggttccgtc

SEQ ID NO: 15456 - RNA, 41 nt, synthetic construct
  source 1..41: mol_type = other RNA
gcgccggtctcgcccaggaccggcaacctcacacacctcaa

SEQ ID NO: 15457 - RNA, 31 nt, synthetic construct
  source 1..31: mol_type = other RNA
tctctccccggactggctcaaacgcacacct

SEQ ID NO: 15458 - RNA, 41 nt, synthetic construct
  source 1..41: mol_type = other RNA
gcacaaacacgctcctcaaagcgcttccgtcccagtagatt

SEQ ID NO: 15459 - RNA, 41 nt, synthetic construct
  source 1..41: mol_type = other RNA
gcacaaacacgctcctcaaagcggttccgtcccagtagatt

SEQ ID NO: 15460 - RNA, 41 nt, synthetic construct
  source 1..41: mol_type = other RNA
gcgccggtcaagcccaggaaaggcacgaacacacacctcaa

SEQ ID NO: 15461 - RNA, 43 nt, synthetic construct
  source 1..43: mol_type = other RNA
gcgccggtcatttcccaggatcaggcacaaacacacacctcaa

SEQ ID NO: 15462 - RNA, 41 nt, synthetic construct
  source 1..41: mol_type = other RNA
acaggcacaaacacgcacgcaaaagcggttcagtcccagta

SEQ ID NO: 15463 - RNA, 41 nt, synthetic construct
  source 1..41: mol_type = other RNA
gcgccggtctctcccaggacaggtataaacgcgcacctcaa

SEQ ID NO: 15464 - RNA, 41 nt, synthetic construct
  source 1..41: mol_type = other RNA
cccaggacgggcacaaacacacacctcaaagcggttccgtc

SEQ ID NO: 15465 - RNA, 31 nt, synthetic construct
  source 1..31: mol_type = other RNA
caaacacgcacctaaaagtggttccgtccca

SEQ ID NO: 15466 - RNA, 40 nt, synthetic construct
  source 1..40: mol_type = other RNA
cccaggacaggcacgaacacgcctctcacagggttccgtc

SEQ ID NO: 15467 - RNA, 41 nt, synthetic construct
  source 1..41: mol_type = other RNA
gcgccggtccattccgggacgggcacaatcacacacctcaa

SEQ ID NO: 15468 - RNA, 41 nt, synthetic construct
  source 1..41: mol_type = other RNA
cccaggacaggctcgaccacacgtctcaaggcggttccgtc

SEQ ID NO: 15469 - RNA, 41 nt, synthetic construct
  source 1..41: mol_type = other RNA
gcacaaacacgcacttcaacgcggttccgtcccagtagatt

SEQ ID NO: 15470 - RNA, 41 nt, synthetic construct
  source 1..41: mol_type = other RNA
acaggcacgcacacgcacctccaagcggtaccgtcccagta

SEQ ID NO: 15471 - RNA, 40 nt, synthetic construct
  source 1..40: mol_type = other RNA
acaggcacaaacacgcaactcaagtggttacgtcccagta

SEQ ID NO: 15472 - RNA, 41 nt, synthetic construct
  source 1..41: mol_type = other RNA
gcgccggtcaaacccaggaaagggacgaacacgcacctcaa

SEQ ID NO: 15473 - RNA, 31 nt, synthetic construct
  source 1..31: mol_type = other RNA
caaacacgcacatcaaagcggttccgtccca

SEQ ID NO: 15474 - RNA, 41 nt, synthetic construct
  source 1..41: mol_type = other RNA
acaggcacgaacacgcacctcaaatcggttccgtcccagta

SEQ ID NO: 15475 - RNA, 31 nt, synthetic construct
  source 1..31: mol_type = other RNA
ggacaggtacgcacacgcacctccaagctgt

SEQ ID NO: 15476 - RNA, 41 nt, synthetic construct
  source 1..41: mol_type = other RNA
acaggcacaaacacgctcctcgaagaggttacgtcccagta

SEQ ID NO: 15477 - RNA, 31 nt, synthetic construct
  source 1..31: mol_type = other RNA
tctctcccaggacaggcacaaatgcgcacct

SEQ ID NO: 15478 - RNA, 41 nt, synthetic construct
  source 1..41: mol_type = other RNA
acaggcacagacacgcaccttaaagcggttccgtcccagta

SEQ ID NO: 15479 - RNA, 31 nt, synthetic construct
  source 1..31: mol_type = other RNA
tctctcccaggaaagacactaacacacacct

SEQ ID NO: 15480 - RNA, 31 nt, synthetic construct
  source 1..31: mol_type = other RNA
caggctcaaacacggacataaacgcggttcc

SEQ ID NO: 15481 - RNA, 31 nt, synthetic construct
  source 1..31: mol_type = other RNA
tctctcccaggacaggaacaagcgcgcacct

SEQ ID NO: 15482 - RNA, 31 nt, synthetic construct
  source 1..31: mol_type = other RNA
caaacacacacctcaaggcggttccgtccca

SEQ ID NO: 15483 - RNA, 41 nt, synthetic construct
  source 1..41: mol_type = other RNA
gcacaaacacgcacctcaaaacggttctgtcccagtagatt

SEQ ID NO: 15484 - RNA, 41 nt, synthetic construct
  source 1..41: mol_type = other RNA
acaggcacatacacacacctcaaagaggttctgtcccagta

SEQ ID NO: 15485 - RNA, 41 nt, synthetic construct
  source 1..41: mol_type = other RNA
cccaggacaggcacgaacacacacctcataacggttccgtc

SEQ ID NO: 15486 - RNA, 41 nt, synthetic construct
  source 1..41: mol_type = other RNA
acaggcacgaacacgcacccaaaagtggttccgtcccagta

SEQ ID NO: 15487 - RNA, 30 nt, synthetic construct
  source 1..30: mol_type = other RNA
tctctgccggggcaggataaacacgcacct

SEQ ID NO: 15488 - RNA, 41 nt, synthetic construct
  source 1..41: mol_type = other RNA
acaggcacaaatgcgcacctcaaagcggttccgtcccagta

SEQ ID NO: 15489 - RNA, 41 nt, synthetic construct
  source 1..41: mol_type = other RNA
cccaggacgggcacaaacacacagcccaaggcggttccgtc

SEQ ID NO: 15490 - RNA, 31 nt, synthetic construct
  source 1..31: mol_type = other RNA
ccaggacaggcacaaacacgcaccttaaagc

SEQ ID NO: 15491 - RNA, 41 nt, synthetic construct
  source 1..41: mol_type = other RNA
cccaggacaggcgcaaacacgctcctcgaagaggttccgtc

SEQ ID NO: 15492 - RNA, 41 nt, synthetic construct
  source 1..41: mol_type = other RNA
gcacaaacacgcacctcaaagcggttccgtcacagtagatt

SEQ ID NO: 15493 - RNA, 31 nt, synthetic construct
  source 1..31: mol_type = other RNA
tctctaccaggccatgcagaaacacacacct

SEQ ID NO: 15494 - RNA, 41 nt, synthetic construct
  source 1..41: mol_type = other RNA
cccaggacaggcacacacacgcacctcaaagcggttccgtc

SEQ ID NO: 15495 - RNA, 41 nt, synthetic construct
  source 1..41: mol_type = other RNA
gtctctcccaggacaggcagaaacacaccaatcaaagctgt

SEQ ID NO: 15496 - RNA, 41 nt, synthetic construct
  source 1..41: mol_type = other RNA
acaggcacgaacacgcgcctcaaagcgattccgtcccagta

SEQ ID NO: 15497 - RNA, 41 nt, synthetic construct
  source 1..41: mol_type = other RNA
acaggcacaaacacgcccctcaaagagattccgtcccagta

SEQ ID NO: 15498 - RNA, 41 nt, synthetic construct
  source 1..41: mol_type = other RNA
gcacaaacacgcacctcaaaacgcttccgacccagtagatt

SEQ ID NO: 15499 - RNA, 31 nt, synthetic construct
  source 1..31: mol_type = other RNA
caaacacactcctcaaaacggttccgtccca

SEQ ID NO: 15500 - RNA, 41 nt, synthetic construct
  source 1..41: mol_type = other RNA
acaggcacgaacacgcacctcaaaatggttccgtcccagta

SEQ ID NO: 15501 - RNA, 41 nt, synthetic construct
  source 1..41: mol_type = other RNA
gcgccggtcaaccccaggaaaggcacgaacacacacctcaa

SEQ ID NO: 15502 - RNA, 41 nt, synthetic construct
  source 1..41: mol_type = other RNA
gcacaaacacgcacctcaaaatggttccgtcccagtagatt

SEQ ID NO: 15503 - RNA, 41 nt, synthetic construct
  source 1..41: mol_type = other RNA
cccaggacaggcaaaaacacgcacctcaaagcggttccgtc

SEQ ID NO: 15504 - RNA, 41 nt, synthetic construct
  source 1..41: mol_type = other RNA
cccaggacaggcacgaacacacacccaaccgtggttccgtc

SEQ ID NO: 15505 - RNA, 40 nt, synthetic construct
  source 1..40: mol_type = other RNA
gcacaaacacgcaactcaagtggttacgtcccagtagatt

SEQ ID NO: 15506 - RNA, 41 nt, synthetic construct
  source 1..41: mol_type = other RNA
cccaggacaggcaaacacacacacctcaaagtggttccgtc

SEQ ID NO: 15507 - RNA, 31 nt, synthetic construct
  source 1..31: mol_type = other RNA
caaacacacacctcaaggtggttccgtccca

SEQ ID NO: 15508 - RNA, 41 nt, synthetic construct
  source 1..41: mol_type = other RNA
cccaggacaggtaaccacacgcacctccgagaggttccgtc

SEQ ID NO: 15509 - RNA, 31 nt, synthetic construct
  source 1..31: mol_type = other RNA
caaacacacatctcagagcggttccgtccca

SEQ ID NO: 15510 - RNA, 45 nt, synthetic construct
  source 1..45: mol_type = other RNA
cccaggacaggcacaaatacgcacctcatcaatccaggttccgtc

SEQ ID NO: 15511 - RNA, 41 nt, synthetic construct
  source 1..41: mol_type = other RNA
gcacaaacacgcacatcaaagcggttccgtcccagtagatt

SEQ ID NO: 15512 - RNA, 41 nt, synthetic construct
  source 1..41: mol_type = other RNA
gcacaaacacgctcctcgaagaggttacgtcccagtagatt

SEQ ID NO: 15513 - RNA, 32 nt, synthetic construct
  source 1..32: mol_type = other RNA
tctctcccaggacaggcgccatctccgcacct

SEQ ID NO: 15514 - RNA, 39 nt, synthetic construct
  source 1..39: mol_type = other RNA
cccaggacaggcaggaacacgcacctcagaggttccgtc

SEQ ID NO: 15515 - RNA, 31 nt, synthetic construct
  source 1..31: mol_type = other RNA
tctctcacaggccaggcccaaacacacacct

SEQ ID NO: 15516 - RNA, 31 nt, synthetic construct
  source 1..31: mol_type = other RNA
caaacacacatctcaaaacggttccatccca

SEQ ID NO: 15517 - RNA, 42 nt, synthetic construct
  source 1..42: mol_type = other RNA
gcacaaacacgcacctcaaagcggttccgtacccagtagatt

SEQ ID NO: 15518 - RNA, 41 nt, synthetic construct
  source 1..41: mol_type = other RNA
gcacaaacacgcacctcaaagaggtttcgtcacagtagatt

SEQ ID NO: 15519 - RNA, 41 nt, synthetic construct
  source 1..41: mol_type = other RNA
gtctctcccaggacaggcaaaaacacaccactcaaagctgt

SEQ ID NO: 15520 - RNA, 41 nt, synthetic construct
  source 1..41: mol_type = other RNA
acaggcacggacacgcgtctcaaagcggttccgtcccagta

SEQ ID NO: 15521 - RNA, 41 nt, synthetic construct
  source 1..41: mol_type = other RNA
gcacaaacacacacctaaaagcggttccgtcaaagtagatt

SEQ ID NO: 15522 - RNA, 42 nt, synthetic construct
  source 1..42: mol_type = other RNA
gcgccggtctgtgccaggacgggactcaaaaacacacctcaa

SEQ ID NO: 15523 - RNA, 31 nt, synthetic construct
  source 1..31: mol_type = other RNA
tctctaccaggacaggtctaagcacacacct

SEQ ID NO: 15524 - RNA, 41 nt, synthetic construct
  source 1..41: mol_type = other RNA
cccaggacaggcacgaacacgcacctcaaagaggttccgtc

SEQ ID NO: 15525 - RNA, 31 nt, synthetic construct
  source 1..31: mol_type = other RNA
caggcacgaacacgcgcctcaaagcggttcc

SEQ ID NO: 15526 - RNA, 31 nt, synthetic construct
  source 1..31: mol_type = other RNA
tctctcccaggataggcaaacacacacacct

SEQ ID NO: 15527 - RNA, 41 nt, synthetic construct
  source 1..41: mol_type = other RNA
acaggcaccaacacgcacatcaaggcggttccgtcccagta

SEQ ID NO: 15528 - RNA, 31 nt, synthetic construct
  source 1..31: mol_type = other RNA
ccaggacaggcacacacacgcacctcaaagc

SEQ ID NO: 15529 - RNA, 31 nt, synthetic construct
  source 1..31: mol_type = other RNA
tctctcccaggacaggtataaacgcgcacct

SEQ ID NO: 15530 - RNA, 41 nt, synthetic construct
  source 1..41: mol_type = other RNA
gcacaaacacgccgctcaaagcgattccgtcccagtagatt

SEQ ID NO: 15531 - RNA, 41 nt, synthetic construct
  source 1..41: mol_type = other RNA
acaggcacaaacacagccctcacagcggttccgtcccagta

SEQ ID NO: 15532 - RNA, 41 nt, synthetic construct
  source 1..41: mol_type = other RNA
gcacaaacacgcacccaaaagcggttccgtcccagtagatt

SEQ ID NO: 15533 - RNA, 31 nt, synthetic construct
  source 1..31: mol_type = other RNA
tctctcccagggctcgcacaaacgcgcacct

SEQ ID NO: 15534 - RNA, 42 nt, synthetic construct
  source 1..42: mol_type = other RNA
gcgccggtcttctcccgggacaggcagaaatgcgcacctcaa

SEQ ID NO: 15535 - RNA, 31 nt, synthetic construct
  source 1..31: mol_type = other RNA
tctctcccgggacaggcagaaatgcgcacct

SEQ ID NO: 15536 - RNA, 40 nt, synthetic construct
  source 1..40: mol_type = other RNA
cccaggacaggataaacacgcgccccaacgtggttccgtc

SEQ ID NO: 15537 - RNA, 41 nt, synthetic construct
  source 1..41: mol_type = other RNA
gcacaaacgcgcacctcaaagcggttccctcccagtagatt

SEQ ID NO: 15538 - RNA, 44 nt, synthetic construct
  source 1..44: mol_type = other RNA
acaggcacaaacacgcacctcaattccacggatccgtcccagta

SEQ ID NO: 15539 - RNA, 31 nt, synthetic construct
  source 1..31: mol_type = other RNA
caggcccaaatgcgcatctcacgacggttcc

SEQ ID NO: 15540 - RNA, 31 nt, synthetic construct
  source 1..31: mol_type = other RNA
caaacacacacctcaaagcggttccgtccca

SEQ ID NO: 15541 - RNA, 41 nt, synthetic construct
  source 1..41: mol_type = other RNA
cccaggacaggccgaaacacgcacctcaaagcggttccgtc

SEQ ID NO: 15542 - RNA, 41 nt, synthetic construct
  source 1..41: mol_type = other RNA
acaggcacgaacgcgcacctcaaagcggttccctcccagta

SEQ ID NO: 15543 - RNA, 44 nt, synthetic construct
  source 1..44: mol_type = other RNA
cccaggacaggcccaaacacgcacctcaattccacggttccgtc

SEQ ID NO: 15544 - RNA, 40 nt, synthetic construct
  source 1..40: mol_type = other RNA
gcacaaacacgcacctcaaagaggttcgtcccagtagatt

SEQ ID NO: 15545 - RNA, 31 nt, synthetic construct
  source 1..31: mol_type = other RNA
ggacaggcactaacacacacatcaaggctgt

SEQ ID NO: 15546 - RNA, 41 nt, synthetic construct
  source 1..41: mol_type = other RNA
cccaggacaggtacgcacacgcacctccaagcggttccgtc

SEQ ID NO: 15547 - RNA, 41 nt, synthetic construct
  source 1..41: mol_type = other RNA
cccaggacaggcacaaacgcacaccttaaagcggttccgtc

SEQ ID NO: 15548 - RNA, 31 nt, synthetic construct
  source 1..31: mol_type = other RNA
caaacacacacctcaaagcgattccgtccca

SEQ ID NO: 15549 - RNA, 31 nt, synthetic construct
  source 1..31: mol_type = other RNA
ccaggacaggcagaaacacgcacctcaaagc

SEQ ID NO: 15550 - RNA, 41 nt, synthetic construct
  source 1..41: mol_type = other RNA
acaggcacaaacacgctcctcaaagcgcttccgtcccagta

SEQ ID NO: 15551 - RNA, 31 nt, synthetic construct
  source 1..31: mol_type = other RNA
caaacacacacctcaaagcggttccatccca

SEQ ID NO: 15552 - RNA, 41 nt, synthetic construct
  source 1..41: mol_type = other RNA
acaggcacgaacacgcacctcaaaacgcttccgtcccagta

SEQ ID NO: 15553 - RNA, 41 nt, synthetic construct
  source 1..41: mol_type = other RNA
gtctctcccaataaaggcacgaacacgcacctcaaagctgt

SEQ ID NO: 15554 - RNA, 41 nt, synthetic construct
  source 1..41: mol_type = other RNA
gcacaaacacgcacctaaaagtggttccgacccagtagatt

SEQ ID NO: 15555 - RNA, 40 nt, synthetic construct
  source 1..40: mol_type = other RNA
acaggcacgaacacgcctctcacagggttccgtcccagta

SEQ ID NO: 15556 - RNA, 31 nt, synthetic construct
  source 1..31: mol_type = other RNA
tctctcccaggaccggcaacaaagcgcacct

SEQ ID NO: 15557 - RNA, 41 nt, synthetic construct
  source 1..41: mol_type = other RNA
gcacaaacacgcgcctcaaagcgattccgttccagtagatt

SEQ ID NO: 15558 - RNA, 31 nt, synthetic construct
  source 1..31: mol_type = other RNA
tctcttccaggacaggcccaaatgcgcacct

SEQ ID NO: 15559 - RNA, 41 nt, synthetic construct
  source 1..41: mol_type = other RNA
gcgccggtctctcccaggaccggcaacaaagcgcacctcaa

SEQ ID NO: 15560 - RNA, 31 nt, synthetic construct
  source 1..31: mol_type = other RNA
ccaggacaggcaaaaacacgcacctcaaagc

SEQ ID NO: 15561 - RNA, 41 nt, synthetic construct
  source 1..41: mol_type = other RNA
cccaggacaggcacaaatgcgcacctcaaagcggttccgtc

SEQ ID NO: 15562 - RNA, 41 nt, synthetic construct
  source 1..41: mol_type = other RNA
gcacaaacacgcacccaaaagtggttccgtcccagtagatt

SEQ ID NO: 15563 - RNA, 31 nt, synthetic construct
  source 1..31: mol_type = other RNA
tctctcccaggacaggcccaaatgcgcacct

SEQ ID NO: 15564 - RNA, 31 nt, synthetic construct
  source 1..31: mol_type = other RNA
ccaggaaaggcacaaatacgcacctcaaagc

SEQ ID NO: 15565 - RNA, 31 nt, synthetic construct
  source 1..31: mol_type = other RNA
caaacacacacctcaaagtggttccgtccca

SEQ ID NO: 15566 - RNA, 41 nt, synthetic construct
  source 1..41: mol_type = other RNA
gcacaaacacgcgtctcaaagcggttacgtcccagtagatt

SEQ ID NO: 15567 - RNA, 31 nt, synthetic construct
  source 1..31: mol_type = other RNA
ccaggacaggcacaaacacacacctcaaagc

SEQ ID NO: 15568 - RNA, 31 nt, synthetic construct
  source 1..31: mol_type = other RNA
caaacacgcacttcaacgcggttccgtccca

SEQ ID NO: 15569 - RNA, 31 nt, synthetic construct
  source 1..31: mol_type = other RNA
ccaggataggcacaaatacacacctaaaagc

SEQ ID NO: 15570 - RNA, 41 nt, synthetic construct
  source 1..41: mol_type = other RNA
cccaggacgggcgcaaaaacgccgctcaaagcggttccgtc

SEQ ID NO: 15571 - RNA, 31 nt, synthetic construct
  source 1..31: mol_type = other RNA
tctctcccagggcaggggcaaatgcgcacct

SEQ ID NO: 15572 - RNA, 43 nt, synthetic construct
  source 1..43: mol_type = other RNA
gtctctcccaggacaggaacaagcgcgaacctttcaaagctgt

SEQ ID NO: 15573 - RNA, 31 nt, synthetic construct
  source 1..31: mol_type = other RNA
caggctcgaccacacgtctcaaggcggttcc

SEQ ID NO: 15574 - RNA, 40 nt, synthetic construct
  source 1..40: mol_type = other RNA
gcacaaacgcgcacctcaagtggttccgtcccagtagatt

SEQ ID NO: 15575 - RNA, 41 nt, synthetic construct
  source 1..41: mol_type = other RNA
acaggcacaaacacgcgccccaacgtgcttccgtcccagta

SEQ ID NO: 15576 - RNA, 31 nt, synthetic construct
  source 1..31: mol_type = other RNA
tctcttcaaggacaggcagaaatgcgcacct

SEQ ID NO: 15577 - RNA, 41 nt, synthetic construct
  source 1..41: mol_type = other RNA
cccaggacaggcgcacacacgcgtctcaacgtggttccgtc

SEQ ID NO: 15578 - RNA, 40 nt, synthetic construct
  source 1..40: mol_type = other RNA
gtctctcccaggccaggcccaaacacaccttcaaagctgt

SEQ ID NO: 15579 - RNA, 42 nt, synthetic construct
  source 1..42: mol_type = other RNA
gcacaaacacgcacctcaaagtggttccgtacccagtagatt

SEQ ID NO: 15580 - RNA, 31 nt, synthetic construct
  source 1..31: mol_type = other RNA
ccaggaaaggcaaaaacacgcacctcaaagc

SEQ ID NO: 15581 - RNA, 41 nt, synthetic construct
  source 1..41: mol_type = other RNA
gcacaaacacacacccaaccgtggttccgtcccagtagatt

SEQ ID NO: 15582 - RNA, 41 nt, synthetic construct
  source 1..41: mol_type = other RNA
cccaggacaggctcaaacgcgcacttcaaagcggttccgtc

SEQ ID NO: 15583 - RNA, 31 nt, synthetic construct
  source 1..31: mol_type = other RNA
ggacaggtaaccacacgcacctccgagctgt

SEQ ID NO: 15584 - RNA, 31 nt, synthetic construct
  source 1..31: mol_type = other RNA
caaacacgccgctcaaagcgattccgtccca

SEQ ID NO: 15585 - RNA, 42 nt, synthetic construct
  source 1..42: mol_type = other RNA
cccaggacgggactcaaaaacaatcatcacagcggttccgtc

SEQ ID NO: 15586 - RNA, 30 nt, synthetic construct
  source 1..30: mol_type = other RNA
ccaggtgcgcacaaacacgcacctcaaagc

SEQ ID NO: 15587 - RNA, 41 nt, synthetic construct
  source 1..41: mol_type = other RNA
cccaggacaggcgcgaacacgcacctcaaaatggttccgtc

SEQ ID NO: 15588 - RNA, 41 nt, synthetic construct
  source 1..41: mol_type = other RNA
acaggcacaaacacgcatctcgaagcgcttccatcccagta

SEQ ID NO: 15589 - RNA, 38 nt, synthetic construct
  source 1..38: mol_type = other RNA
acaggcacgaacacgcacctcagagttccgtcccagta

SEQ ID NO: 15590 - RNA, 31 nt, synthetic construct
  source 1..31: mol_type = other RNA
tctctaccgggaccggcacacacacacacct

SEQ ID NO: 15591 - RNA, 41 nt, synthetic construct
  source 1..41: mol_type = other RNA
gtctctccaaggacaggaccaaacacgtacctcaaagctgt

SEQ ID NO: 15592 - RNA, 42 nt, synthetic construct
  source 1..42: mol_type = other RNA
gcgccggtctccaccaggacaggcaaaaacacagcacctcaa

SEQ ID NO: 15593 - RNA, 30 nt, synthetic construct
  source 1..30: mol_type = other RNA
caaacacgcatatcaaagcgttccgtccca

SEQ ID NO: 15594 - RNA, 31 nt, synthetic construct
  source 1..31: mol_type = other RNA
caggcacgaacacacacccaaccgtggttcc

SEQ ID NO: 15595 - RNA, 31 nt, synthetic construct
  source 1..31: mol_type = other RNA
ccaggaagggcccaaacacgcacctcaaagc

SEQ ID NO: 15596 - RNA, 31 nt, synthetic construct
  source 1..31: mol_type = other RNA
caggcggaatcacgcccctgaaaggggttcc

SEQ ID NO: 15597 - RNA, 41 nt, synthetic construct
  source 1..41: mol_type = other RNA
gcacaaacacgcacctcaaagtggttcagtgccagtagatt

SEQ ID NO: 15598 - RNA, 41 nt, synthetic construct
  source 1..41: mol_type = other RNA
cccaggacgggcacaaacacgcacttcaacgcggttccgtc

SEQ ID NO: 15599 - RNA, 31 nt, synthetic construct
  source 1..31: mol_type = other RNA
tctctcccaataaaggcacgaacacgcacct

SEQ ID NO: 15600 - RNA, 31 nt, synthetic construct
  source 1..31: mol_type = other RNA
caaacacacacatcaaggcggttccgtccca

SEQ ID NO: 15601 - RNA, 31 nt, synthetic construct
  source 1..31: mol_type = other RNA
ccaggacaggcagaaacacgcccctcaaagc

SEQ ID NO: 15602 - RNA, 31 nt, synthetic construct
  source 1..31: mol_type = other RNA
ccaggacaggcacaaacgcacaccttaaagc

SEQ ID NO: 15603 - RNA, 42 nt, synthetic construct
  source 1..42: mol_type = other RNA
gtctctcccaggacgggactcaaaaacaatcatcaaagctgt

SEQ ID NO: 15604 - RNA, 41 nt, synthetic construct
  source 1..41: mol_type = other RNA
cccaggacaggcacgaacacacacccaaaagtggttccgtc

SEQ ID NO: 15605 - RNA, 29 nt, synthetic construct
  source 1..29: mol_type = other RNA
tctctcccaggacccacagacacacacct

SEQ ID NO: 15606 - RNA, 39 nt, synthetic construct
  source 1..39: mol_type = other RNA
cccaggacccacaaacacgcacctcaaagcggttccgtc

SEQ ID NO: 15607 - RNA, 31 nt, synthetic construct
  source 1..31: mol_type = other RNA
caggcacaaacacacacatcaaagcggttcc

SEQ ID NO: 15608 - RNA, 31 nt, synthetic construct
  source 1..31: mol_type = other RNA
ccaggacaggcaccaatacgcacatcaaagc

SEQ ID NO: 15609 - RNA, 41 nt, synthetic construct
  source 1..41: mol_type = other RNA
gtctctcccaggaccggcaacaaagcgcacgtcaaagctgt

SEQ ID NO: 15610 - RNA, 41 nt, synthetic construct
  source 1..41: mol_type = other RNA
gcacaaacgcgcacctcaaagcggttccgtcccagtagatt

SEQ ID NO: 15611 - RNA, 40 nt, synthetic construct
  source 1..40: mol_type = other RNA
cccaggacagcacagacacgcaccttaaagcggttccgtc

SEQ ID NO: 15612 - RNA, 41 nt, synthetic construct
  source 1..41: mol_type = other RNA
gtctctcccaggacagggtcaaacacggacataaaagctgt

SEQ ID NO: 15613 - RNA, 31 nt, synthetic construct
  source 1..31: mol_type = other RNA
caggcacaaatacgcacctcaaagcggttcc

SEQ ID NO: 15614 - RNA, 41 nt, synthetic construct
  source 1..41: mol_type = other RNA
acaggcacgaacacgcacctcaaagtggttcagtcccagta

SEQ ID NO: 15615 - RNA, 41 nt, synthetic construct
  source 1..41: mol_type = other RNA
acaggcacaaatgcgcatctcacgacggttccgtcccagta

SEQ ID NO: 15616 - RNA, 40 nt, synthetic construct
  source 1..40: mol_type = other RNA
acaggcacgaacacgcacctcaaagaggttcgtcccagta

SEQ ID NO: 15617 - RNA, 41 nt, synthetic construct
  source 1..41: mol_type = other RNA
cccaggacaggcgcgaacacgctcctcaaagcggttccgtc

SEQ ID NO: 15618 - RNA, 41 nt, synthetic construct
  source 1..41: mol_type = other RNA
acaggcacacacacgcgtctcaacgtggttccgtcccagta

SEQ ID NO: 15619 - RNA, 31 nt, synthetic construct
  source 1..31: mol_type = other RNA
ggacaggcaccaacacgcacatcaaggctgt

SEQ ID NO: 15620 - RNA, 31 nt, synthetic construct
  source 1..31: mol_type = other RNA
caggcacgaacacacatctcaaaacggttcc

SEQ ID NO: 15621 - RNA, 37 nt, synthetic construct
  source 1..37: mol_type = other RNA
ccagggcccaggggcacacaaacacacacctcaaagc

SEQ ID NO: 15622 - RNA, 31 nt, synthetic construct
  source 1..31: mol_type = other RNA
caaacacacgtctcaaggcggttccgtccca

SEQ ID NO: 15623 - RNA, 41 nt, synthetic construct
  source 1..41: mol_type = other RNA
cccaggacaggtataaacgcgcacttcaattgggttccgtc

SEQ ID NO: 15624 - RNA, 31 nt, synthetic construct
  source 1..31: mol_type = other RNA
ggacaggtacgaacacgcacctcaaagctgt

SEQ ID NO: 15625 - RNA, 31 nt, synthetic construct
  source 1..31: mol_type = other RNA
tctctccccagaaaggcactaacacacacct

SEQ ID NO: 15626 - RNA, 42 nt, synthetic construct
  source 1..42: mol_type = other RNA
gcacaaacacgcacctccgagaggtaccgtacccagtagatt

SEQ ID NO: 15627 - RNA, 41 nt, synthetic construct
  source 1..41: mol_type = other RNA
gcacaaacacgcgtctcaacgtggttccgtcccagtagatt

SEQ ID NO: 15628 - RNA, 41 nt, synthetic construct
  source 1..41: mol_type = other RNA
acaggcacaaacacgcgcatcaaggcggttccgtcccagta

SEQ ID NO: 15629 - RNA, 41 nt, synthetic construct
  source 1..41: mol_type = other RNA
acaggcacaaacacaccactcaaagtggttccgtcccagta

SEQ ID NO: 15630 - RNA, 42 nt, synthetic construct
  source 1..42: mol_type = other RNA
gcacaaacacgcccctcaaagagattccgaacccagtagatt

SEQ ID NO: 15631 - RNA, 41 nt, synthetic construct
  source 1..41: mol_type = other RNA
cccaggacaggcacaaatacacacctaaaagcggttccgtc

SEQ ID NO: 15632 - RNA, 31 nt, synthetic construct
  source 1..31: mol_type = other RNA
caaacacgcatctcaaaaaggttccatccca

SEQ ID NO: 15633 - RNA, 31 nt, synthetic construct
  source 1..31: mol_type = other RNA
ccaggacaggcacaaacacgcacctcaaagc

SEQ ID NO: 15634 - RNA, 30 nt, synthetic construct
  source 1..30: mol_type = other RNA
ggacagggcaaatgcgcacctcaaagctgt

SEQ ID NO: 15635 - RNA, 31 nt, synthetic construct
  source 1..31: mol_type = other RNA
caaacacgcacgtcaaagcggttccgtccca

SEQ ID NO: 15636 - RNA, 41 nt, synthetic construct
  source 1..41: mol_type = other RNA
cccaggacaggtatacacacgcacgtcaaagcggttccgtc

SEQ ID NO: 15637 - RNA, 31 nt, synthetic construct
  source 1..31: mol_type = other RNA
tctctaccgggacagaaccaaacacacacct

SEQ ID NO: 15638 - RNA, 42 nt, synthetic construct
  source 1..42: mol_type = other RNA
gcacaaacacgcgccccaacgtgcttccgttcccagtagatt

SEQ ID NO: 15639 - RNA, 31 nt, synthetic construct
  source 1..31: mol_type = other RNA
ggacaggtataaacgcgcacttcaatgctgt

SEQ ID NO: 15640 - RNA, 31 nt, synthetic construct
  source 1..31: mol_type = other RNA
caaacacgcacctcaaaacggttctgtccca

SEQ ID NO: 15641 - RNA, 31 nt, synthetic construct
  source 1..31: mol_type = other RNA
ccaggacagacacaaacacacacctcaaagc

SEQ ID NO: 15642 - RNA, 31 nt, synthetic construct
  source 1..31: mol_type = other RNA
ggacaggcacaaacacgcacatagaagctgt

SEQ ID NO: 15643 - RNA, 31 nt, synthetic construct
  source 1..31: mol_type = other RNA
caaacacgcacatcaaggcggttccgtccca

SEQ ID NO: 15644 - RNA, 31 nt, synthetic construct
  source 1..31: mol_type = other RNA
caaacactcgtctggaagcgctttcgtccca

SEQ ID NO: 15645 - RNA, 31 nt, synthetic construct
  source 1..31: mol_type = other RNA
caggcagaaacacgcacctcagagcggttcc

SEQ ID NO: 15646 - RNA, 41 nt, synthetic construct
  source 1..41: mol_type = other RNA
gcgccggtctctccgagggcaggcacagacacccacctcaa

SEQ ID NO: 15647 - RNA, 31 nt, synthetic construct
  source 1..31: mol_type = other RNA
caaacacgcaccttaaagcggttccgtccca

SEQ ID NO: 15648 - RNA, 41 nt, synthetic construct
  source 1..41: mol_type = other RNA
acaggcacgaacacgcgtctcaaagcggttacgtcccagta

SEQ ID NO: 15649 - RNA, 41 nt, synthetic construct
  source 1..41: mol_type = other RNA
cccaggacgggcccaaacacgcacctcaaagcggttccgtc

SEQ ID NO: 15650 - RNA, 40 nt, synthetic construct
  source 1..40: mol_type = other RNA
gcacaaacacaccactcaaagtggttccgcccagtagatt

SEQ ID NO: 15651 - RNA, 41 nt, synthetic construct
  source 1..41: mol_type = other RNA
gcacaaacacgcacctcagagttccgtactaccagtagatt

SEQ ID NO: 15652 - RNA, 31 nt, synthetic construct
  source 1..31: mol_type = other RNA
ccaggccatgcagaaacacacacctcaaagc

SEQ ID NO: 15653 - RNA, 34 nt, synthetic construct
  source 1..34: mol_type = other RNA
caggcccaaacacgcacctcaattccacggttcc

SEQ ID NO: 15654 - RNA, 31 nt, synthetic construct
  source 1..31: mol_type = other RNA
ggacaggcacaaacacgcacttcaacgctgt

SEQ ID NO: 15655 - RNA, 31 nt, synthetic construct
  source 1..31: mol_type = other RNA
ccaggaaaggtacgaacacgcacctcaaagc

SEQ ID NO: 15656 - RNA, 31 nt, synthetic construct
  source 1..31: mol_type = other RNA
ccaggacaggcacaaacacgctcctcaaagc

SEQ ID NO: 15657 - RNA, 31 nt, synthetic construct
  source 1..31: mol_type = other RNA
caaacacacacttcagagcgcttccgtccca

SEQ ID NO: 15658 - RNA, 31 nt, synthetic construct
  source 1..31: mol_type = other RNA
caaacacacacctcataacggtaccgtccca

SEQ ID NO: 15659 - RNA, 41 nt, synthetic construct
  source 1..41: mol_type = other RNA
gcacaaacacgcacatagaagcggttccgtcaaagtagatt

SEQ ID NO: 15660 - RNA, 31 nt, synthetic construct
  source 1..31: mol_type = other RNA
ccaggaaaggcacgaacacgcacctcaaagc

SEQ ID NO: 15661 - RNA, 31 nt, synthetic construct
  source 1..31: mol_type = other RNA
ggacaggcacgaacacgcacctcaaagctgt

SEQ ID NO: 15662 - RNA, 31 nt, synthetic construct
  source 1..31: mol_type = other RNA
caaacacgcacctcaaaacgcttccgtccca

SEQ ID NO: 15663 - RNA, 40 nt, synthetic construct
  source 1..40: mol_type = other RNA
acaggcacaaatgcgcacctcaagtggttccgtcccagta

SEQ ID NO: 15664 - RNA, 29 nt, synthetic construct
  source 1..29: mol_type = other RNA
caggcaggaacacgcacctcagaggttcc

SEQ ID NO: 15665 - RNA, 28 nt, synthetic construct
  source 1..28: mol_type = other RNA
caaacacgcacctcagagttccgtccca

SEQ ID NO: 15666 - RNA, 31 nt, synthetic construct
  source 1..31: mol_type = other RNA
caggcagaaacacacacctcaaggtggttcc

SEQ ID NO: 15667 - RNA, 39 nt, synthetic construct
  source 1..39: mol_type = other RNA
cccaggacccacagacacacacctcaaggcggttccgtc

SEQ ID NO: 15668 - RNA, 41 nt, synthetic construct
  source 1..41: mol_type = other RNA
acaggcacaaatgcgcacctcaaagtggttcaatcccagta

SEQ ID NO: 15669 - RNA, 31 nt, synthetic construct
  source 1..31: mol_type = other RNA
caaacacgctcctcaaagcggttccgtccca

SEQ ID NO: 15670 - RNA, 35 nt, synthetic construct
  source 1..35: mol_type = other RNA
caggcacaaatacgcacctcatcaatccaggttcc

SEQ ID NO: 15671 - RNA, 41 nt, synthetic construct
  source 1..41: mol_type = other RNA
acaggcacaaacgcacaccttaaagcggttccgtcccagta

SEQ ID NO: 15672 - RNA, 40 nt, synthetic construct
  source 1..40: mol_type = other RNA
acaggcacaaacacaccttcgcagcggttccgtcccagta

SEQ ID NO: 15673 - RNA, 31 nt, synthetic construct
  source 1..31: mol_type = other RNA
caggcacgaacacgcatctcaaaaaggttcc

SEQ ID NO: 15674 - RNA, 31 nt, synthetic construct
  source 1..31: mol_type = other RNA
ccaggaaagggacgaacacgcatctcaaagc

SEQ ID NO: 15675 - RNA, 31 nt, synthetic construct
  source 1..31: mol_type = other RNA
caggcaggaacacgcacctcaaagtggttcc

SEQ ID NO: 15676 - RNA, 29 nt, synthetic construct
  source 1..29: mol_type = other RNA
ccaggaaccacaaacacgcacctcaaagc

SEQ ID NO: 15677 - RNA, 31 nt, synthetic construct
  source 1..31: mol_type = other RNA
caggcaaaaacacgcacctcaaagcggttcc

SEQ ID NO: 15678 - RNA, 32 nt, synthetic construct
  source 1..32: mol_type = other RNA
ccaggacgggactcaaaaacaatcatcaaagc

SEQ ID NO: 15679 - RNA, 30 nt, synthetic construct
  source 1..30: mol_type = other RNA
tctctcccaggagggcagaaagacacacct

SEQ ID NO: 15680 - RNA, 41 nt, synthetic construct
  source 1..41: mol_type = other RNA
gcacaaacgcgcacgtcaaagcggttcagtcaaagtagatt

SEQ ID NO: 15681 - RNA, 39 nt, synthetic construct
  source 1..39: mol_type = other RNA
gcacaaacacgcatctcgaagcgcttccaccagtagatt

SEQ ID NO: 15682 - RNA, 41 nt, synthetic construct
  source 1..41: mol_type = other RNA
acaggcacaaacgcacacctcgaagcggttccatcccagta

SEQ ID NO: 15683 - RNA, 48 nt, synthetic construct
  source 1..48: mol_type = other RNA
acaggcacaaacacacgtctcaaaagcctcaggttcaccttcccagta

SEQ ID NO: 15684 - RNA, 31 nt, synthetic construct
  source 1..31: mol_type = other RNA
ccaggaaaggcacgaacacgcacccaaaagc

SEQ ID NO: 15685 - RNA, 41 nt, synthetic construct
  source 1..41: mol_type = other RNA
cccaggacaggcagaaacgcgcacctcgaagcggttccgtc

SEQ ID NO: 15686 - RNA, 31 nt, synthetic construct
  source 1..31: mol_type = other RNA
ggacagctacaaacacacacatcaaagctgt

SEQ ID NO: 15687 - RNA, 31 nt, synthetic construct
  source 1..31: mol_type = other RNA
ggacaggcccaaacacgcacctcaatgctgt

SEQ ID NO: 15688 - RNA, 31 nt, synthetic construct
  source 1..31: mol_type = other RNA
caaacacaccaaccgtaacgcggtcgtccca

SEQ ID NO: 15689 - RNA, 31 nt, synthetic construct
  source 1..31: mol_type = other RNA
caggcacaaacacacatctcagagcggttcc

SEQ ID NO: 15690 - RNA, 31 nt, synthetic construct
  source 1..31: mol_type = other RNA
caaacacacacctcaaagaggttctgtccca

SEQ ID NO: 15691 - RNA, 31 nt, synthetic construct
  source 1..31: mol_type = other RNA
ccaggaaaggcacgaacacacacctcaaagc

SEQ ID NO: 15692 - RNA, 31 nt, synthetic construct
  source 1..31: mol_type = other RNA
ggacaggcacaaatacgcacctcatcgctgt

SEQ ID NO: 15693 - RNA, 31 nt, synthetic construct
  source 1..31: mol_type = other RNA
ccaggataggcacaaacacgcacataaaagc

SEQ ID NO: 15694 - RNA, 41 nt, synthetic construct
  source 1..41: mol_type = other RNA
acaggcacgaacacacatctcaaaacggttccatcccagta

SEQ ID NO: 15695 - RNA, 31 nt, synthetic construct
  source 1..31: mol_type = other RNA
caggcacaaacacgcacctcaaagcggttcc

SEQ ID NO: 15696 - RNA, 31 nt, synthetic construct
  source 1..31: mol_type = other RNA
caaacacgcagctcaaagcggttcagtccca

SEQ ID NO: 15697 - RNA, 29 nt, synthetic construct
  source 1..29: mol_type = other RNA
tctctagggacaggcaccaatacgcacct

SEQ ID NO: 15698 - RNA, 31 nt, synthetic construct
  source 1..31: mol_type = other RNA
ggacaggcacaaacacgcacggtaaagctgt

SEQ ID NO: 15699 - RNA, 31 nt, synthetic construct
  source 1..31: mol_type = other RNA
ccaggacagctacaaacacacacatcaaagc

SEQ ID NO: 15700 - RNA, 41 nt, synthetic construct
  source 1..41: mol_type = other RNA
gtctctcccaggatgggcacgagaccccacctcaaagctgt

SEQ ID NO: 15701 - RNA, 30 nt, synthetic construct
  source 1..30: mol_type = other RNA
ccaggaccggacaaacacgcatctcaaagc

SEQ ID NO: 15702 - RNA, 30 nt, synthetic construct
  source 1..30: mol_type = other RNA
ggacaggacaaacacgcatctcgaagctgt

SEQ ID NO: 15703 - RNA, 31 nt, synthetic construct
  source 1..31: mol_type = other RNA
ggacaggctcgaccacacgtctcaaggctgt

SEQ ID NO: 15704 - RNA, 40 nt, synthetic construct
  source 1..40: mol_type = other RNA
cccaggacaggcagaaatgcgcacctcaagtggttccgtc

SEQ ID NO: 15705 - RNA, 31 nt, synthetic construct
  source 1..31: mol_type = other RNA
caggcagaatcacacccctcaaagtggttcc

SEQ ID NO: 15706 - RNA, 31 nt, synthetic construct
  source 1..31: mol_type = other RNA
caaacacacccctcaaagtggtccagtccca

SEQ ID NO: 15707 - RNA, 31 nt, synthetic construct
  source 1..31: mol_type = other RNA
ccaggacaggccgaaacacgcacctcaaagc

SEQ ID NO: 15708 - RNA, 31 nt, synthetic construct
  source 1..31: mol_type = other RNA
ggacaggcaggaacacgcacctcagagctgt

SEQ ID NO: 15709 - RNA, 31 nt, synthetic construct
  source 1..31: mol_type = other RNA
caaacacacacctaaaagcggttccgtccca

SEQ ID NO: 15710 - RNA, 34 nt, synthetic construct
  source 1..34: mol_type = other RNA
caaacacgcacctcaattccacggatccgtccca

SEQ ID NO: 15711 - RNA, 31 nt, synthetic construct
  source 1..31: mol_type = other RNA
ccaggatgggcacaaacacgcacttcaaagc

SEQ ID NO: 15712 - RNA, 31 nt, synthetic construct
  source 1..31: mol_type = other RNA
ccaggacaggcacaaacacacacgtcaaagc

SEQ ID NO: 15713 - RNA, 42 nt, synthetic construct
  source 1..42: mol_type = other RNA
gcacaaacacgcacctccaagcggtaccgtacccagtagatt

SEQ ID NO: 15714 - RNA, 31 nt, synthetic construct
  source 1..31: mol_type = other RNA
ccaggaaaggcgcaaacacgctcctcaaagc

SEQ ID NO: 15715 - RNA, 31 nt, synthetic construct
  source 1..31: mol_type = other RNA
caggcaacaacacgcacctaaaagtggttcc

SEQ ID NO: 15716 - RNA, 31 nt, synthetic construct
  source 1..31: mol_type = other RNA
ggacacgcaacaacacgcacctaaaagctgt

SEQ ID NO: 15717 - RNA, 31 nt, synthetic construct
  source 1..31: mol_type = other RNA
ggacaggcacaaacacacatctcagagctgt

SEQ ID NO: 15718 - RNA, 39 nt, synthetic construct
  source 1..39: mol_type = other RNA
gcgccggtttcccaagacaggcacaaatgcacacctcaa

SEQ ID NO: 15719 - RNA, 31 nt, synthetic construct
  source 1..31: mol_type = other RNA
ggacaggcgcaaaaacgccgctcaaagctgt

SEQ ID NO: 15720 - RNA, 55 nt, synthetic construct
  source 1..55: mol_type = other RNA
gcacaaacacagccctcacagcggttccgaaaaaaaaaaaaaaacccagtagatt

SEQ ID NO: 15721 - RNA, 31 nt, synthetic construct
  source 1..31: mol_type = other RNA
tctctcccaggatgggcacgagaccccacct

SEQ ID NO: 15722 - RNA, 31 nt, synthetic construct
  source 1..31: mol_type = other RNA
ccaggacagtcacaaaaacgcacctgaaagc

SEQ ID NO: 15723 - RNA, 32 nt, synthetic construct
  source 1..32: mol_type = other RNA
ccaggatcaggcacaaacacacacctcaaagc

SEQ ID NO: 15724 - RNA, 31 nt, synthetic construct
  source 1..31: mol_type = other RNA
caaacacgcatctcaaagcggtgccgtccca

SEQ ID NO: 15725 - RNA, 41 nt, synthetic construct
  source 1..41: mol_type = other RNA
cccaggacagggtcaaacacggacataaacgcggttccgtc

SEQ ID NO: 15726 - RNA, 31 nt, synthetic construct
  source 1..31: mol_type = other RNA
ggacaggcacacacacacacatcaaagctgt

SEQ ID NO: 15727 - RNA, 40 nt, synthetic construct
  source 1..40: mol_type = other RNA
gcacaaacacaccactcaaagcggttccacccagtagatt

SEQ ID NO: 15728 - RNA, 41 nt, synthetic construct
  source 1..41: mol_type = other RNA
cccaggacaggcacggacacgcgtctcaaagcggttccgtc

SEQ ID NO: 15729 - RNA, 31 nt, synthetic construct
  source 1..31: mol_type = other RNA
ccaggacgggcgcaaaaacgcagctcaaagc

SEQ ID NO: 15730 - RNA, 41 nt, synthetic construct
  source 1..41: mol_type = other RNA
gcacaaacgcgcacctcaaagcggttccgtcacagtagatt

SEQ ID NO: 15731 - RNA, 31 nt, synthetic construct
  source 1..31: mol_type = other RNA
ccaggaccggcaacaaagcgcacgtcaaagc

SEQ ID NO: 15732 - RNA, 31 nt, synthetic construct
  source 1..31: mol_type = other RNA
ccaggataggcacaaacacgcacgcaaaagc

SEQ ID NO: 15733 - RNA, 31 nt, synthetic construct
  source 1..31: mol_type = other RNA
caaacacgcacctcaaagtggttccgtccca

SEQ ID NO: 15734 - RNA, 41 nt, synthetic construct
  source 1..41: mol_type = other RNA
cccaggacaggcacagacacccacctcaaagaggttccgtc

SEQ ID NO: 15735 - RNA, 31 nt, synthetic construct
  source 1..31: mol_type = other RNA
ggacagggacaaacacgcgcatcaaggctgt

SEQ ID NO: 15736 - RNA, 31 nt, synthetic construct
  source 1..31: mol_type = other RNA
caaacacggacataaacgcggttgcgtccca

SEQ ID NO: 15737 - RNA, 31 nt, synthetic construct
  source 1..31: mol_type = other RNA
ccaggacaggcacaaatacgcacctcaaagc

SEQ ID NO: 15738 - RNA, 31 nt, synthetic construct
  source 1..31: mol_type = other RNA
ggacaggcagaatcacacccctcaaagctgt

SEQ ID NO: 15739 - RNA, 31 nt, synthetic construct
  source 1..31: mol_type = other RNA
ccaggaccggcacacacacacacatcaaagc

SEQ ID NO: 15740 - RNA, 31 nt, synthetic construct
  source 1..31: mol_type = other RNA
ccaggacaggcccaaacacgcacctcaaagc

SEQ ID NO: 15741 - RNA, 31 nt, synthetic construct
  source 1..31: mol_type = other RNA
caggcacgcacacgcacctccaagcggttcc

SEQ ID NO: 15742 - RNA, 31 nt, synthetic construct
  source 1..31: mol_type = other RNA
caggcgcaaacacgctcctcgaagaggttcc

SEQ ID NO: 15743 - RNA, 30 nt, synthetic construct
  source 1..30: mol_type = other RNA
caggcgcaaacacgcaactcaagtggttcc

SEQ ID NO: 15744 - RNA, 31 nt, synthetic construct
  source 1..31: mol_type = other RNA
ggacagacacaaacacacacctcaaagctgt

SEQ ID NO: 15745 - RNA, 31 nt, synthetic construct
  source 1..31: mol_type = other RNA
caggcagatacacacacctcaaagaggttcc

SEQ ID NO: 15746 - RNA, 31 nt, synthetic construct
  source 1..31: mol_type = other RNA
ggacaggcagatacacacacctcaaagctgt

SEQ ID NO: 15747 - RNA, 31 nt, synthetic construct
  source 1..31: mol_type = other RNA
ggacaggcacgaacacacacctcatagctgt

SEQ ID NO: 15748 - RNA, 40 nt, synthetic construct
  source 1..40: mol_type = other RNA
gcacaaacacaccttcgcagcggttccgtcccagtagatt

SEQ ID NO: 15749 - RNA, 41 nt, synthetic construct
  source 1..41: mol_type = other RNA
acaggcacaaaaacgccgctcaaagcgattccgtcccagta

SEQ ID NO: 15750 - RNA, 31 nt, synthetic construct
  source 1..31: mol_type = other RNA
caggcacaaacgcgcacttcaaagtggttcc

SEQ ID NO: 15751 - RNA, 31 nt, synthetic construct
  source 1..31: mol_type = other RNA
ccaggaaaggcaggaacacgcacctcaaagc

SEQ ID NO: 15752 - RNA, 31 nt, synthetic construct
  source 1..31: mol_type = other RNA
ggacaggcaccaatacgcacatcaaagctgt

SEQ ID NO: 15753 - RNA, 39 nt, synthetic construct
  source 1..39: mol_type = other RNA
gcacaaacacgcacctcaaagcggttccgtcagtagatt

SEQ ID NO: 15754 - RNA, 31 nt, synthetic construct
  source 1..31: mol_type = other RNA
ccaggacaggtatacacacgcacgtcaaagc

SEQ ID NO: 15755 - RNA, 31 nt, synthetic construct
  source 1..31: mol_type = other RNA
ggacaggcacaaacacgcacgcaaaagctgt

SEQ ID NO: 15756 - RNA, 31 nt, synthetic construct
  source 1..31: mol_type = other RNA
ccaggatgggcacaaacacacagcccaaagc

SEQ ID NO: 15757 - RNA, 30 nt, synthetic construct
  source 1..30: mol_type = other RNA
ggacagcacagacacgcaccttaaagctgt

SEQ ID NO: 15758 - RNA, 31 nt, synthetic construct
  source 1..31: mol_type = other RNA
caaacacgcgtctcaaagcggttacgtccca

SEQ ID NO: 15759 - RNA, 41 nt, synthetic construct
  source 1..41: mol_type = other RNA
gcacaaacacggacataaacgcggttgcgtcttagtagatt

SEQ ID NO: 15760 - RNA, 31 nt, synthetic construct
  source 1..31: mol_type = other RNA
caggcacaagcgcgaacctttcagcggttcc

SEQ ID NO: 15761 - RNA, 31 nt, synthetic construct
  source 1..31: mol_type = other RNA
ggacaggcacaaatacgcacctcaaagctgt

SEQ ID NO: 15762 - RNA, 31 nt, synthetic construct
  source 1..31: mol_type = other RNA
ggacaggcgcaaacacgctcctcaaagctgt

SEQ ID NO: 15763 - RNA, 42 nt, synthetic construct
  source 1..42: mol_type = other RNA
gtctctcccaggacaggcgccatctccgcccctcaaagctgt

SEQ ID NO: 15764 - RNA, 48 nt, synthetic construct
  source 1..48: mol_type = other RNA
gcacaaacacacgtctcaaaagcctcaggttcaccttcccagtagatt

SEQ ID NO: 15765 - RNA, 31 nt, synthetic construct
  source 1..31: mol_type = other RNA
caggcacgaacacacacccaaaagtggttcc

SEQ ID NO: 15766 - RNA, 31 nt, synthetic construct
  source 1..31: mol_type = other RNA
caggcacacacacacacatcaaagcggttcc

SEQ ID NO: 15767 - RNA, 31 nt, synthetic construct
  source 1..31: mol_type = other RNA
ggacaggcacacacacgcacctcaaagctgt

SEQ ID NO: 15768 - RNA, 31 nt, synthetic construct
  source 1..31: mol_type = other RNA
ccaggacaggcaagaacgcgcacctcaaagc

SEQ ID NO: 15769 - RNA, 31 nt, synthetic construct
  source 1..31: mol_type = other RNA
ccaggacaggtataaacgcgcacttcaaagc

SEQ ID NO: 15770 - RNA, 29 nt, synthetic construct
  source 1..29: mol_type = other RNA
ggacacacagacacacacctcaaggctgt

SEQ ID NO: 15771 - RNA, 31 nt, synthetic construct
  source 1..31: mol_type = other RNA
caaacacgcacctcaaatcggttccgtccca

SEQ ID NO: 15772 - RNA, 31 nt, synthetic construct
  source 1..31: mol_type = other RNA
caaacacacacgtcaaagcggtaccgtccca

SEQ ID NO: 15773 - RNA, 33 nt, synthetic construct
  source 1..33: mol_type = other RNA
ggacaggtctaagcacaccaaccgtaacgctgt

SEQ ID NO: 15774 - RNA, 31 nt, synthetic construct
  source 1..31: mol_type = other RNA
ccaggcaaggtacgcacacgcacctcaaagc

SEQ ID NO: 15775 - RNA, 31 nt, synthetic construct
  source 1..31: mol_type = other RNA
ggacaggcacaaacacgcaccttaaagctgt

SEQ ID NO: 15776 - RNA, 31 nt, synthetic construct
  source 1..31: mol_type = other RNA
ggacaggcacaaatgcacaccttaaagctgt

SEQ ID NO: 15777 - RNA, 41 nt, synthetic construct
  source 1..41: mol_type = other RNA
gcacaaacgcacaccttaaagcggttccgtcccagtagatt

SEQ ID NO: 15778 - RNA, 31 nt, synthetic construct
  source 1..31: mol_type = other RNA
ccaggataggcaccaacacgcacatcaaagc

SEQ ID NO: 15779 - RNA, 31 nt, synthetic construct
  source 1..31: mol_type = other RNA
ggacaggcaggaacacgcacctcaaagctgt

SEQ ID NO: 15780 - RNA, 30 nt, synthetic construct
  source 1..30: mol_type = other RNA
ggacaggcacgaacacacacccaacgctgt

SEQ ID NO: 15781 - RNA, 31 nt, synthetic construct
  source 1..31: mol_type = other RNA
caaacacacaactcgatacggtcccgtccca

SEQ ID NO: 15782 - RNA, 31 nt, synthetic construct
  source 1..31: mol_type = other RNA
ggacaggcaacaaagcgcacgtcaaagctgt

SEQ ID NO: 15783 - RNA, 41 nt, synthetic construct
  source 1..41: mol_type = other RNA
cccaggaccggcaacaaagcgcacgtcaaagcggttccgtc

SEQ ID NO: 15784 - RNA, 31 nt, synthetic construct
  source 1..31: mol_type = other RNA
caggcacaaacacgcatctcgaagcggttcc

SEQ ID NO: 15785 - RNA, 31 nt, synthetic construct
  source 1..31: mol_type = other RNA
ggacaggcacaaacacacagcccaaggctgt

SEQ ID NO: 15786 - RNA, 31 nt, synthetic construct
  source 1..31: mol_type = other RNA
caaacacgcgcatcaaggcggttccgtccca

SEQ ID NO: 15787 - RNA, 41 nt, synthetic construct
  source 1..41: mol_type = other RNA
gcacaaacacgcgcatcaaggcggttccgttacagtagatt

SEQ ID NO: 15788 - RNA, 31 nt, synthetic construct
  source 1..31: mol_type = other RNA
caggcccaaacacgcacctcaaagcggttcc

SEQ ID NO: 15789 - RNA, 41 nt, synthetic construct
  source 1..41: mol_type = other RNA
acaggcacaaacacggacataaacgcggttgcgtcccagta

SEQ ID NO: 15790 - RNA, 31 nt, synthetic construct
  source 1..31: mol_type = other RNA
ccaggacaggcactaacacacacctcaaagc

SEQ ID NO: 15791 - RNA, 41 nt, synthetic construct
  source 1..41: mol_type = other RNA
gcacaaacacgcacctcaaagcggttccgtcgaagtagatt

SEQ ID NO: 15792 - RNA, 41 nt, synthetic construct
  source 1..41: mol_type = other RNA
acaggcacaatcacgcccctgaaagggcttacgtcccagta

SEQ ID NO: 15793 - RNA, 41 nt, synthetic construct
  source 1..41: mol_type = other RNA
acaggcacatctccgcccctcaaagcggttcagtcccagta

SEQ ID NO: 15794 - RNA, 41 nt, synthetic construct
  source 1..41: mol_type = other RNA
acaggcacaaacgcgcacttcaaagcggttgcgtcccagta

SEQ ID NO: 15795 - RNA, 31 nt, synthetic construct
  source 1..31: mol_type = other RNA
caaacgcgcacttcaaagcggttgcgtccca

SEQ ID NO: 15796 - RNA, 46 nt, synthetic construct
  source 1..46: mol_type = other RNA
cccaggacagaaccaaacacacgtctcaaaagcctcaggttccgtc

SEQ ID NO: 15797 - RNA, 31 nt, synthetic construct
  source 1..31: mol_type = other RNA
ggacaggcacgaacacgcacccaaaagctgt

SEQ ID NO: 15798 - RNA, 31 nt, synthetic construct
  source 1..31: mol_type = other RNA
ggacaggcagaaacgcgcacctcgaagctgt

SEQ ID NO: 15799 - RNA, 31 nt, synthetic construct
  source 1..31: mol_type = other RNA
caggcacaaacacgcacttcaacgcggttcc

SEQ ID NO: 15800 - RNA, 31 nt, synthetic construct
  source 1..31: mol_type = other RNA
caggcactaacacacacatcaaggcggttcc

SEQ ID NO: 15801 - RNA, 41 nt, synthetic construct
  source 1..41: mol_type = other RNA
cccaggacaggcagaaatgcgcacctcaaagtggttccgtc

SEQ ID NO: 15802 - RNA, 31 nt, synthetic construct
  source 1..31: mol_type = other RNA
caaacacgcccctcaaagagattccgtccca

SEQ ID NO: 15803 - RNA, 31 nt, synthetic construct
  source 1..31: mol_type = other RNA
caggcacaaacacgctcctcaaagcggttcc

SEQ ID NO: 15804 - RNA, 31 nt, synthetic construct
  source 1..31: mol_type = other RNA
caaacacgctcctcaaagcgcttccgtccca

SEQ ID NO: 15805 - RNA, 31 nt, synthetic construct
  source 1..31: mol_type = other RNA
ccaggaaacgcaacaacacgcacctaaaagc

SEQ ID NO: 15806 - RNA, 31 nt, synthetic construct
  source 1..31: mol_type = other RNA
caaacacgcgtctcaacgtggttccgtccca

SEQ ID NO: 15807 - RNA, 31 nt, synthetic construct
  source 1..31: mol_type = other RNA
ccaggacaggcgcaaacacgcaactcaaagc

SEQ ID NO: 15808 - RNA, 31 nt, synthetic construct
  source 1..31: mol_type = other RNA
ggacaggcacgaacacgcctctcacagctgt

SEQ ID NO: 15809 - RNA, 31 nt, synthetic construct
  source 1..31: mol_type = other RNA
ccaggacaggcagaaatacaccactcaaagc

SEQ ID NO: 15810 - RNA, 31 nt, synthetic construct
  source 1..31: mol_type = other RNA
ccaggacaggcagatacacacacctcaaagc

SEQ ID NO: 15811 - RNA, 31 nt, synthetic construct
  source 1..31: mol_type = other RNA
ccaggataggcaaacacacacacctcaaagc

SEQ ID NO: 15812 - RNA, 31 nt, synthetic construct
  source 1..31: mol_type = other RNA
caggcacaaacacgcaccttaaagcggttcc

SEQ ID NO: 15813 - RNA, 41 nt, synthetic construct
  source 1..41: mol_type = other RNA
acaggcacaaacacgtacctcatagcggttccgtcccagta

SEQ ID NO: 15814 - RNA, 29 nt, synthetic construct
  source 1..29: mol_type = other RNA
tctctaaagataggcaccaacacgcacct

SEQ ID NO: 15815 - RNA, 31 nt, synthetic construct
  source 1..31: mol_type = other RNA
caggcacaaacacgcacccaaaagcggttcc

SEQ ID NO: 15816 - RNA, 32 nt, synthetic construct
  source 1..32: mol_type = other RNA
tctctgccaggacgggactcaaaaacacacct

SEQ ID NO: 15817 - RNA, 31 nt, synthetic construct
  source 1..31: mol_type = other RNA
caggcaccaatacgcacatcaaagcggttcc

SEQ ID NO: 15818 - RNA, 31 nt, synthetic construct
  source 1..31: mol_type = other RNA
ggacaggcacaaacacgcacctcaaagctgt

SEQ ID NO: 15819 - RNA, 41 nt, synthetic construct
  source 1..41: mol_type = other RNA
acaggcacaaatgcacaccttaaagcggttccgtcccagta

SEQ ID NO: 15820 - RNA, 31 nt, synthetic construct
  source 1..31: mol_type = other RNA
caggcaacaaagcgcacgtcaaagcggttcc

SEQ ID NO: 15821 - RNA, 31 nt, synthetic construct
  source 1..31: mol_type = other RNA
caggcatacacacgcacgtcaaagcggttcc

SEQ ID NO: 15822 - RNA, 31 nt, synthetic construct
  source 1..31: mol_type = other RNA
caggcacaaacacgcacgcaaaagcggttcc

SEQ ID NO: 15823 - RNA, 41 nt, synthetic construct
  source 1..41: mol_type = other RNA
gcacaaacacgcacgcaaaagcggttcagtccgagtagatt

SEQ ID NO: 15824 - RNA, 31 nt, synthetic construct
  source 1..31: mol_type = other RNA
ggacaggcagaaacacgcacctcagagctgt

SEQ ID NO: 15825 - RNA, 41 nt, synthetic construct
  source 1..41: mol_type = other RNA
gcacaaacacccacctcaaagaggttccgtcccagtagatt

SEQ ID NO: 15826 - RNA, 31 nt, synthetic construct
  source 1..31: mol_type = other RNA
caaacacgcacctcaaagcggttccgtccca

SEQ ID NO: 15827 - RNA, 31 nt, synthetic construct
  source 1..31: mol_type = other RNA
caggcacaaacacgcgcatcaaggcggttcc

SEQ ID NO: 15828 - RNA, 31 nt, synthetic construct
  source 1..31: mol_type = other RNA
ggacagacatgaacacactcctcaaggctgt

SEQ ID NO: 15829 - RNA, 31 nt, synthetic construct
  source 1..31: mol_type = other RNA
caaacacactcctcaaggcggttaagtccca

SEQ ID NO: 15830 - RNA, 31 nt, synthetic construct
  source 1..31: mol_type = other RNA
ggacaggcccaaacacgcacctcaaagctgt

SEQ ID NO: 15831 - RNA, 31 nt, synthetic construct
  source 1..31: mol_type = other RNA
ccaggaaaggctcgaccacacgtctcaaagc

SEQ ID NO: 15832 - RNA, 31 nt, synthetic construct
  source 1..31: mol_type = other RNA
caggcactaacacacacctcaaggcggttcc

SEQ ID NO: 15833 - RNA, 31 nt, synthetic construct
  source 1..31: mol_type = other RNA
caggcgcaaacacgctcctcaaaacggttcc

SEQ ID NO: 15834 - RNA, 41 nt, synthetic construct
  source 1..41: mol_type = other RNA
gcacaaacacgcccctgaaagggcttacgtcccagtagatt

SEQ ID NO: 15835 - RNA, 42 nt, synthetic construct
  source 1..42: mol_type = other RNA
cccaggacaggcgccatctccgcccctcaaagcggttccgtc

SEQ ID NO: 15836 - RNA, 31 nt, synthetic construct
  source 1..31: mol_type = other RNA
caaacacgcacctcaaagcggttccatccca

SEQ ID NO: 15837 - RNA, 31 nt, synthetic construct
  source 1..31: mol_type = other RNA
caaacacgcgccccaacgtgcttccgtccca

SEQ ID NO: 15838 - RNA, 30 nt, synthetic construct
  source 1..30: mol_type = other RNA
caaacgcgcacctcgaagcgatccatccca

SEQ ID NO: 15839 - RNA, 31 nt, synthetic construct
  source 1..31: mol_type = other RNA
ggacatgcagaaacacacacctcaaggctgt

SEQ ID NO: 15840 - RNA, 40 nt, synthetic construct
  source 1..40: mol_type = other RNA
acaggcacaaacacaccaatcaaagaggttcctcccagta

SEQ ID NO: 15841 - RNA, 32 nt, synthetic construct
  source 1..32: mol_type = other RNA
ggacaggcccaaatgcgcatctcacgagctgt

SEQ ID NO: 15842 - RNA, 31 nt, synthetic construct
  source 1..31: mol_type = other RNA
caaacgcgcatctcacgacggttccgtccca

SEQ ID NO: 15843 - RNA, 31 nt, synthetic construct
  source 1..31: mol_type = other RNA
ggacaggcacaaacacacacgtcaaagctgt

SEQ ID NO: 15844 - RNA, 31 nt, synthetic construct
  source 1..31: mol_type = other RNA
caaacgcgcacctcaaagtggttcaatccca

SEQ ID NO: 15845 - RNA, 42 nt, synthetic construct
  source 1..42: mol_type = other RNA
gcacaaacgcgcacctcaaagtggttcaaagcccagtagatt

SEQ ID NO: 15846 - RNA, 31 nt, synthetic construct
  source 1..31: mol_type = other RNA
caaacacacacctcaaagcggttcagtccca

SEQ ID NO: 15847 - RNA, 31 nt, synthetic construct
  source 1..31: mol_type = other RNA
ccaggccaggtaaccacacgcacctcaaagc

SEQ ID NO: 15848 - RNA, 30 nt, synthetic construct
  source 1..30: mol_type = other RNA
ggacaggcgcaaacacgcaactcaagctgt

SEQ ID NO: 15849 - RNA, 56 nt, synthetic construct
  source 1..56: mol_type = other RNA
gtctctcccaattaaaacacgagtcggacaggcagaaatacaccactcaaagctgt

SEQ ID NO: 15850 - RNA, 35 nt, synthetic construct
  source 1..35: mol_type = other RNA
caaacacgcacctcatcaatccaggttccgtccca

SEQ ID NO: 15851 - RNA, 31 nt, synthetic construct
  source 1..31: mol_type = other RNA
ccaggacaggcacaaatgcacaccttaaagc

SEQ ID NO: 15852 - RNA, 30 nt, synthetic construct
  source 1..30: mol_type = other RNA
ccaggccaggcccaaacacaccttcaaagc

SEQ ID NO: 15853 - RNA, 31 nt, synthetic construct
  source 1..31: mol_type = other RNA
ccaggacaggaccaaacacgtacctcaaagc

SEQ ID NO: 15854 - RNA, 31 nt, synthetic construct
  source 1..31: mol_type = other RNA
caggcaccaacacgcacatcaaggcggttcc

SEQ ID NO: 15855 - RNA, 31 nt, synthetic construct
  source 1..31: mol_type = other RNA
ccaggacaggcaaaaacacagccctcaaagc

SEQ ID NO: 15856 - RNA, 31 nt, synthetic construct
  source 1..31: mol_type = other RNA
ggacaggcacgaacacacatctcaaagctgt

SEQ ID NO: 15857 - RNA, 31 nt, synthetic construct
  source 1..31: mol_type = other RNA
ggacaggcaaaaacacgcacctcaaagctgt

SEQ ID NO: 15858 - RNA, 31 nt, synthetic construct
  source 1..31: mol_type = other RNA
caaacacgcacctcaaagaggtttcgtccca

SEQ ID NO: 15859 - RNA, 30 nt, synthetic construct
  source 1..30: mol_type = other RNA
ggacagcacaaacacgcacctcaaagctgt

SEQ ID NO: 15860 - RNA, 31 nt, synthetic construct
  source 1..31: mol_type = other RNA
ggacaggtatacacacgcacgtcaaagctgt

SEQ ID NO: 15861 - RNA, 31 nt, synthetic construct
  source 1..31: mol_type = other RNA
caaacacgcacctcagagcggttccgtccca

SEQ ID NO: 15862 - RNA, 31 nt, synthetic construct
  source 1..31: mol_type = other RNA
caaacacccacctcaaagaggttccgtccca

SEQ ID NO: 15863 - RNA, 31 nt, synthetic construct
  source 1..31: mol_type = other RNA
ccaggacagggacaaacacgcgcatcaaagc

SEQ ID NO: 15864 - RNA, 31 nt, synthetic construct
  source 1..31: mol_type = other RNA
caggcaaaaacacaccactcaaagtggttcc

SEQ ID NO: 15865 - RNA, 31 nt, synthetic construct
  source 1..31: mol_type = other RNA
caaacacaccactcaaagtggttccgtccca

SEQ ID NO: 15866 - RNA, 41 nt, synthetic construct
  source 1..41: mol_type = other RNA
cccaggacaggcaaaaacacaccactcaaagtggttccgtc

SEQ ID NO: 15867 - RNA, 31 nt, synthetic construct
  source 1..31: mol_type = other RNA
ggacaggcactaacacacacctcaaggctgt

SEQ ID NO: 15868 - RNA, 31 nt, synthetic construct
  source 1..31: mol_type = other RNA
ggacaggcgcgaacacactcctcaaagctgt

SEQ ID NO: 15869 - RNA, 31 nt, synthetic construct
  source 1..31: mol_type = other RNA
ccaggacaggcggaatcacgcccctgaaagc

SEQ ID NO: 15870 - RNA, 31 nt, synthetic construct
  source 1..31: mol_type = other RNA
caaacacgcccctgaaagggcttacgtccca

SEQ ID NO: 15871 - RNA, 32 nt, synthetic construct
  source 1..32: mol_type = other RNA
ccaggacaggcgccatctccgcccctcaaagc

SEQ ID NO: 15872 - RNA, 31 nt, synthetic construct
  source 1..31: mol_type = other RNA
ccaggacaggcagaatcacacccctcaaagc

SEQ ID NO: 15873 - RNA, 31 nt, synthetic construct
  source 1..31: mol_type = other RNA
caggcacgaacacgcacccaaaagtggttcc

SEQ ID NO: 15874 - RNA, 31 nt, synthetic construct
  source 1..31: mol_type = other RNA
caaacacgcacccaaaagtggttccgtccca

SEQ ID NO: 15875 - RNA, 31 nt, synthetic construct
  source 1..31: mol_type = other RNA
caggcgcgaacacgcacctcaaaatggttcc

SEQ ID NO: 15876 - RNA, 30 nt, synthetic construct
  source 1..30: mol_type = other RNA
ccagggcaggataaacacgcgccccaaagc

SEQ ID NO: 15877 - RNA, 31 nt, synthetic construct
  source 1..31: mol_type = other RNA
caggcagaaacgcgcacctcgaagcggttcc

SEQ ID NO: 15878 - RNA, 40 nt, synthetic construct
  source 1..40: mol_type = other RNA
gcacaaacgcgcacctcgaagcgatccattccagtagatt

SEQ ID NO: 15879 - RNA, 31 nt, synthetic construct
  source 1..31: mol_type = other RNA
caggcacacacacacacctaaaagcggttcc

SEQ ID NO: 15880 - RNA, 31 nt, synthetic construct
  source 1..31: mol_type = other RNA
ggacaggcagaaacacaccaatcaaagctgt

SEQ ID NO: 15881 - RNA, 41 nt, synthetic construct
  source 1..41: mol_type = other RNA
gcacaaacgcgcatctcacgacggttccgttccagtagatt

SEQ ID NO: 15882 - RNA, 41 nt, synthetic construct
  source 1..41: mol_type = other RNA
cccaggacaggcccaaatgcgcatctcacgacggttccgtc

SEQ ID NO: 15883 - RNA, 31 nt, synthetic construct
  source 1..31: mol_type = other RNA
ggacaggcagaaacacgcccctcaaagctgt

SEQ ID NO: 15884 - RNA, 31 nt, synthetic construct
  source 1..31: mol_type = other RNA
ggacaggcacaaacacgctcctcaaagctgt

SEQ ID NO: 15885 - RNA, 32 nt, synthetic construct
  source 1..32: mol_type = other RNA
ccaggatcaggcacaaacacacatctcaaagc

SEQ ID NO: 15886 - RNA, 30 nt, synthetic construct
  source 1..30: mol_type = other RNA
caaacacgcaactcaagtggttacgtccca

SEQ ID NO: 15887 - RNA, 31 nt, synthetic construct
  source 1..31: mol_type = other RNA
caggcactaacacacacttcagagcggttcc

SEQ ID NO: 15888 - RNA, 30 nt, synthetic construct
  source 1..30: mol_type = other RNA
ggacaggcccaaacacaccttcgcagctgt

SEQ ID NO: 15889 - RNA, 31 nt, synthetic construct
  source 1..31: mol_type = other RNA
ggacaggcacaaatacacacctaaaagctgt

SEQ ID NO: 15890 - RNA, 31 nt, synthetic construct
  source 1..31: mol_type = other RNA
caaacacgcacatagaagcggttccgtccca

SEQ ID NO: 15891 - RNA, 41 nt, synthetic construct
  source 1..41: mol_type = other RNA
acaggcacaaacgcgcacttcaaagtggttccgtcccagta

SEQ ID NO: 15892 - RNA, 41 nt, synthetic construct
  source 1..41: mol_type = other RNA
gcacaaacacaatcatcacagcggttcagtcccagtagatt

SEQ ID NO: 15893 - RNA, 31 nt, synthetic construct
  source 1..31: mol_type = other RNA
tctctcccaggaccggcaacctcacacacct

SEQ ID NO: 15894 - RNA, 31 nt, synthetic construct
  source 1..31: mol_type = other RNA
caaacacgtccctcaaagcggttccgtccca

SEQ ID NO: 15895 - RNA, 31 nt, synthetic construct
  source 1..31: mol_type = other RNA
ccaggacaggcacaaatgcgcacctcaaagc

SEQ ID NO: 15896 - RNA, 41 nt, synthetic construct
  source 1..41: mol_type = other RNA
acaggcacagacacccacctcaaagaggttccgtcccagta

SEQ ID NO: 15897 - RNA, 31 nt, synthetic construct
  source 1..31: mol_type = other RNA
caaacacgcatctcgaagcgcttccatccca

SEQ ID NO: 15898 - RNA, 41 nt, synthetic construct
  source 1..41: mol_type = other RNA
acaggcacaagcgcgaacctttcagcggttccgtcccagta

SEQ ID NO: 15899 - RNA, 31 nt, synthetic construct
  source 1..31: mol_type = other RNA
caggcaggaacacgcacctcaaaacggttcc

SEQ ID NO: 15900 - RNA, 31 nt, synthetic construct
  source 1..31: mol_type = other RNA
ccaggacaggcagaaatgcgcacctcaaagc

SEQ ID NO: 15901 - RNA, 30 nt, synthetic construct
  source 1..30: mol_type = other RNA
ggacaggcagaaatgcgcacctcaagctgt

SEQ ID NO: 15902 - RNA, 31 nt, synthetic construct
  source 1..31: mol_type = other RNA
ccaggactggcgcaaacacgctcctcaaagc

SEQ ID NO: 15903 - RNA, 31 nt, synthetic construct
  source 1..31: mol_type = other RNA
caggcgcgaacacactcctcaaaacggttcc

SEQ ID NO: 15904 - RNA, 31 nt, synthetic construct
  source 1..31: mol_type = other RNA
ggacaggcggaatcacgcccctgaaagctgt

SEQ ID NO: 15905 - RNA, 31 nt, synthetic construct
  source 1..31: mol_type = other RNA
ggacaggctcaaacgcacacctcgaagctgt

SEQ ID NO: 15906 - RNA, 31 nt, synthetic construct
  source 1..31: mol_type = other RNA
ccaggacagaaccaaacacacgtctcaaagc

SEQ ID NO: 15907 - RNA, 38 nt, synthetic construct
  source 1..38: mol_type = other RNA
caaacacacgtctcaaaagcctcaggttcaccttccca

SEQ ID NO: 15908 - RNA, 31 nt, synthetic construct
  source 1..31: mol_type = other RNA
ccaggaaaggcacgaacacacacccaaaagc

SEQ ID NO: 15909 - RNA, 31 nt, synthetic construct
  source 1..31: mol_type = other RNA
ggacaggcacgaacacacacccaaaagctgt

SEQ ID NO: 15910 - RNA, 31 nt, synthetic construct
  source 1..31: mol_type = other RNA
caaacacgcacctcaaaatggttccgtccca

SEQ ID NO: 15911 - RNA, 31 nt, synthetic construct
  source 1..31: mol_type = other RNA
ccaggataggcacacacacacacctaaaagc

SEQ ID NO: 15912 - RNA, 31 nt, synthetic construct
  source 1..31: mol_type = other RNA
ggacaggcacacacacacacctaaaagctgt

SEQ ID NO: 15913 - RNA, 31 nt, synthetic construct
  source 1..31: mol_type = other RNA
ccaggacaggcagaaacacaccaatcaaagc

SEQ ID NO: 15914 - RNA, 31 nt, synthetic construct
  source 1..31: mol_type = other RNA
caaacgcgcacctcaaagcggttccctccca

SEQ ID NO: 15915 - RNA, 31 nt, synthetic construct
  source 1..31: mol_type = other RNA
ccaggcaaggcacgaacacgcacctcaaagc

SEQ ID NO: 15916 - RNA, 31 nt, synthetic construct
  source 1..31: mol_type = other RNA
caggcacaaacacacacgtcaaagcggttcc

SEQ ID NO: 15917 - RNA, 33 nt, synthetic construct
  source 1..33: mol_type = other RNA
caggcctaagcacaccaaccgtaacgcggttcc

SEQ ID NO: 15918 - RNA, 39 nt, synthetic construct
  source 1..39: mol_type = other RNA
gcacaaacacaccaaccgtaacgcggtcgccagtagatt

SEQ ID NO: 15919 - RNA, 43 nt, synthetic construct
  source 1..43: mol_type = other RNA
gtctctcccaggacaggtctaagcacaccaaccgtaaagctgt

SEQ ID NO: 15920 - RNA, 31 nt, synthetic construct
  source 1..31: mol_type = other RNA
caaacacgcacctccaagcggtaccgtccca

SEQ ID NO: 15921 - RNA, 31 nt, synthetic construct
  source 1..31: mol_type = other RNA
ggacaggcacgaacacgcgcctcaaagctgt

SEQ ID NO: 15922 - RNA, 31 nt, synthetic construct
  source 1..31: mol_type = other RNA
caggcgcgaacacgctcctcaaagcggttcc

SEQ ID NO: 15923 - RNA, 31 nt, synthetic construct
  source 1..31: mol_type = other RNA
caggcgcacacacgcgtctcaacgtggttcc

SEQ ID NO: 15924 - RNA, 31 nt, synthetic construct
  source 1..31: mol_type = other RNA
ccaggacaggcgcacacacgcgtctcaaagc

SEQ ID NO: 15925 - RNA, 31 nt, synthetic construct
  source 1..31: mol_type = other RNA
ccaggaaaggcacgaacacgcctctcaaagc

SEQ ID NO: 15926 - RNA, 31 nt, synthetic construct
  source 1..31: mol_type = other RNA
ggacaggcagaaatacaccactcaaagctgt

SEQ ID NO: 15927 - RNA, 41 nt, synthetic construct
  source 1..41: mol_type = other RNA
cccaggacaggcagaaatacaccactcaaagcggttccgtc

SEQ ID NO: 15928 - RNA, 30 nt, synthetic construct
  source 1..30: mol_type = other RNA
caaacacaccttcgcagcggttccgtccca

SEQ ID NO: 15929 - RNA, 31 nt, synthetic construct
  source 1..31: mol_type = other RNA
ccaggaaaggcacgaacacacatctcaaagc

SEQ ID NO: 15930 - RNA, 33 nt, synthetic construct
  source 1..33: mol_type = other RNA
ggacaggcacacaaacacacacctcaaagctgt

SEQ ID NO: 15931 - RNA, 31 nt, synthetic construct
  source 1..31: mol_type = other RNA
ggacacgcacaaacgcgcacttcaaagctgt

SEQ ID NO: 15932 - RNA, 29 nt, synthetic construct
  source 1..29: mol_type = other RNA
ggacacacaaacacgcacctcaaagctgt

SEQ ID NO: 15933 - RNA, 41 nt, synthetic construct
  source 1..41: mol_type = other RNA
cccaggacgggcgcaaaaacgcagctcaaagcggttccgtc

SEQ ID NO: 15934 - RNA, 31 nt, synthetic construct
  source 1..31: mol_type = other RNA
caggcacaaacacgcacctcaaagaggttcc

SEQ ID NO: 15935 - RNA, 31 nt, synthetic construct
  source 1..31: mol_type = other RNA
caaacacacacctcggagcgggtacgtccca

SEQ ID NO: 15936 - RNA, 31 nt, synthetic construct
  source 1..31: mol_type = other RNA
caaacgcgcacgtcaaagcggttcagtccca

SEQ ID NO: 15937 - RNA, 31 nt, synthetic construct
  source 1..31: mol_type = other RNA
caggcacaaatgcgcacctcaaagcggttcc

SEQ ID NO: 15938 - RNA, 31 nt, synthetic construct
  source 1..31: mol_type = other RNA
ggacaggcacaaatgcgcacctcaaagctgt

SEQ ID NO: 15939 - RNA, 31 nt, synthetic construct
  source 1..31: mol_type = other RNA
caaacgcgcacctcaaagcggttccgtccca

SEQ ID NO: 15940 - RNA, 31 nt, synthetic construct
  source 1..31: mol_type = other RNA
tctctccgagggcaggcacagacacccacct

SEQ ID NO: 15941 - RNA, 31 nt, synthetic construct
  source 1..31: mol_type = other RNA
caggcacaaacacacagcccaaggcggttcc

SEQ ID NO: 15942 - RNA, 31 nt, synthetic construct
  source 1..31: mol_type = other RNA
ccaggacagacatgaacacactcctcaaagc

SEQ ID NO: 15943 - RNA, 31 nt, synthetic construct
  source 1..31: mol_type = other RNA
ggacacgcacgaacacgcgtctcaaagctgt

SEQ ID NO: 15944 - RNA, 31 nt, synthetic construct
  source 1..31: mol_type = other RNA
ccaggacagggtcaaacacggacataaaagc

SEQ ID NO: 15945 - RNA, 41 nt, synthetic construct
  source 1..41: mol_type = other RNA
gcacaaacgcgaacctttcagcggttccgtcctagtagatt

SEQ ID NO: 15946 - RNA, 31 nt, synthetic construct
  source 1..31: mol_type = other RNA
caaacacgctcctcaaaacggatccgtccca

SEQ ID NO: 15947 - RNA, 31 nt, synthetic construct
  source 1..31: mol_type = other RNA
ggacaggcacaaacacacacctcaaagctgt

SEQ ID NO: 15948 - RNA, 32 nt, synthetic construct
  source 1..32: mol_type = other RNA
ggacaggcgccatctccgcccctcaaagctgt

SEQ ID NO: 15949 - RNA, 31 nt, synthetic construct
  source 1..31: mol_type = other RNA
ccaggactggctcaaacgcacacctcaaagc

SEQ ID NO: 15950 - RNA, 41 nt, synthetic construct
  source 1..41: mol_type = other RNA
cccaggactggctcaaacgcacacctcgaagcggttccgtc

SEQ ID NO: 15951 - RNA, 31 nt, synthetic construct
  source 1..31: mol_type = other RNA
caggccgaaacacgcacctcaaagcggttcc

SEQ ID NO: 15952 - RNA, 36 nt, synthetic construct
  source 1..36: mol_type = other RNA
caggcccaaacacacgtctcaaaagcctcaggttcc

SEQ ID NO: 15953 - RNA, 31 nt, synthetic construct
  source 1..31: mol_type = other RNA
ccaggacaggcagaaacgcgcacctcaaagc

SEQ ID NO: 15954 - RNA, 31 nt, synthetic construct
  source 1..31: mol_type = other RNA
caggcacacacacgcacctcaaagcggttcc

SEQ ID NO: 15955 - RNA, 38 nt, synthetic construct
  source 1..38: mol_type = other RNA
gcacaaacacaccaatcaaagaggttccccagtagatt

SEQ ID NO: 15956 - RNA, 41 nt, synthetic construct
  source 1..41: mol_type = other RNA
gcacaaacgcgcacttcaattgggttccgtgctagtagatt

SEQ ID NO: 15957 - RNA, 31 nt, synthetic construct
  source 1..31: mol_type = other RNA
caggcacagacacacacctcaaggcggttcc

SEQ ID NO: 15958 - RNA, 31 nt, synthetic construct
  source 1..31: mol_type = other RNA
caggcacgaacacgcacctcaaatcggttcc

SEQ ID NO: 15959 - RNA, 31 nt, synthetic construct
  source 1..31: mol_type = other RNA
ggacaggcagaaatgcgcacctcaaagctgt

SEQ ID NO: 15960 - RNA, 31 nt, synthetic construct
  source 1..31: mol_type = other RNA
caaacacgcacctccgagaggtaccgtccca

SEQ ID NO: 15961 - RNA, 31 nt, synthetic construct
  source 1..31: mol_type = other RNA
ccaggaaaggcacgaacacgcgcctcaaagc

SEQ ID NO: 15962 - RNA, 31 nt, synthetic construct
  source 1..31: mol_type = other RNA
caggcagaaacacgcccctcaaagaggttcc

SEQ ID NO: 15963 - RNA, 31 nt, synthetic construct
  source 1..31: mol_type = other RNA
ggacaggcgcaaacacgctcctcgaagctgt

SEQ ID NO: 15964 - RNA, 31 nt, synthetic construct
  source 1..31: mol_type = other RNA
ggacaggcgcgaacacgctcctcaaagctgt

SEQ ID NO: 15965 - RNA, 31 nt, synthetic construct
  source 1..31: mol_type = other RNA
ccaggaaagacactaacacacacttcaaagc

SEQ ID NO: 15966 - RNA, 31 nt, synthetic construct
  source 1..31: mol_type = other RNA
ggacagacactaacacacacttcagagctgt

SEQ ID NO: 15967 - RNA, 31 nt, synthetic construct
  source 1..31: mol_type = other RNA
caggcacgaacacacacctcataacggttcc

SEQ ID NO: 15968 - RNA, 30 nt, synthetic construct
  source 1..30: mol_type = other RNA
caggcccaaacacaccttcgcagcggttcc

SEQ ID NO: 15969 - RNA, 31 nt, synthetic construct
  source 1..31: mol_type = other RNA
caggcacaaacacgcacatagaagcggttcc

SEQ ID NO: 15970 - RNA, 31 nt, synthetic construct
  source 1..31: mol_type = other RNA
caggcccaaacacgtacctcatagcggttcc

SEQ ID NO: 15971 - RNA, 31 nt, synthetic construct
  source 1..31: mol_type = other RNA
ggacaggaccaaacacgtacctcatagctgt

SEQ ID NO: 15972 - RNA, 31 nt, synthetic construct
  source 1..31: mol_type = other RNA
ccaggacgggcgcaaaaacgccgctcaaagc

SEQ ID NO: 15973 - RNA, 41 nt, synthetic construct
  source 1..41: mol_type = other RNA
gtctctcccaggacaggcaaaaacacagccctcaaagctgt

SEQ ID NO: 15974 - RNA, 41 nt, synthetic construct
  source 1..41: mol_type = other RNA
cccaggacagggacgaacacgcatctcaaaaaggttccgtc

SEQ ID NO: 15975 - RNA, 31 nt, synthetic construct
  source 1..31: mol_type = other RNA
caaacacgcacccaaaagcggttccgtccca

SEQ ID NO: 15976 - RNA, 31 nt, synthetic construct
  source 1..31: mol_type = other RNA
caaacacacacccaaccgtggttccgtccca

SEQ ID NO: 15977 - RNA, 30 nt, synthetic construct
  source 1..30: mol_type = other RNA
ggacaggcccaaatgcgcacccaacgctgt

SEQ ID NO: 15978 - RNA, 41 nt, synthetic construct
  source 1..41: mol_type = other RNA
gcacaaacgcgcacccaaccgcggttccgtcccagtagatt

SEQ ID NO: 15979 - RNA, 31 nt, synthetic construct
  source 1..31: mol_type = other RNA
caggcacagacacgcaccttaaagcggttcc

SEQ ID NO: 15980 - RNA, 31 nt, synthetic construct
  source 1..31: mol_type = other RNA
ccaggaaacgcacgaacacgcgtctcaaagc

SEQ ID NO: 15981 - RNA, 31 nt, synthetic construct
  source 1..31: mol_type = other RNA
ggacaggaacaagcgcgaacctttcagctgt

SEQ ID NO: 15982 - RNA, 41 nt, synthetic construct
  source 1..41: mol_type = other RNA
cccaggacaggaacaagcgcgaacctttcagcggttccgtc

SEQ ID NO: 15983 - RNA, 30 nt, synthetic construct
  source 1..30: mol_type = other RNA
caggcagaaatgcgcacctcaagtggttcc

SEQ ID NO: 15984 - RNA, 31 nt, synthetic construct
  source 1..31: mol_type = other RNA
caggcacaaacacacacctcaaagcggttcc

SEQ ID NO: 15985 - RNA, 32 nt, synthetic construct
  source 1..32: mol_type = other RNA
caggcgccatctccgcccctcaaagcggttcc

SEQ ID NO: 15986 - RNA, 41 nt, synthetic construct
  source 1..41: mol_type = other RNA
gcacaaacccgcccctcaaagcggttcagtcccagtagatt

SEQ ID NO: 15987 - RNA, 31 nt, synthetic construct
  source 1..31: mol_type = other RNA
caggctcaaacgcgcacttcaaagcggttcc

SEQ ID NO: 15988 - RNA, 31 nt, synthetic construct
  source 1..31: mol_type = other RNA
ccaggacaggctcaaacgcgcacttcaaagc

SEQ ID NO: 15989 - RNA, 31 nt, synthetic construct
  source 1..31: mol_type = other RNA
caggctcaaacgcacacctcgaagcggttcc

SEQ ID NO: 15990 - RNA, 31 nt, synthetic construct
  source 1..31: mol_type = other RNA
caaacgcacacctcgaagcggttccatccca

SEQ ID NO: 15991 - RNA, 31 nt, synthetic construct
  source 1..31: mol_type = other RNA
ggacagaaccaaacacacgtctcaaagctgt

SEQ ID NO: 15992 - RNA, 31 nt, synthetic construct
  source 1..31: mol_type = other RNA
ccaggaaaggcgcgaacacgcacctcaaagc

SEQ ID NO: 15993 - RNA, 30 nt, synthetic construct
  source 1..30: mol_type = other RNA
caggctaaacacgcgccccaacgtggttcc

SEQ ID NO: 15994 - RNA, 40 nt, synthetic construct
  source 1..40: mol_type = other RNA
acaggcacaaacgcgcacctcgaagcgatccatcccagta

SEQ ID NO: 15995 - RNA, 31 nt, synthetic construct
  source 1..31: mol_type = other RNA
ggacaggcaagaacgcgcacctcaaagctgt

SEQ ID NO: 15996 - RNA, 41 nt, synthetic construct
  source 1..41: mol_type = other RNA
cccaggacaggcaagaacgcgcacctcaaagcggttccgtc

SEQ ID NO: 15997 - RNA, 29 nt, synthetic construct
  source 1..29: mol_type = other RNA
ccaggacccacagacacacacctcaaagc

SEQ ID NO: 15998 - RNA, 31 nt, synthetic construct
  source 1..31: mol_type = other RNA
caggcacgaacacgcacctcaaagaggttcc

SEQ ID NO: 15999 - RNA, 31 nt, synthetic construct
  source 1..31: mol_type = other RNA
ccaggaaaggcactaacacacacatcaaagc

SEQ ID NO: 16000 - RNA, 31 nt, synthetic construct
  source 1..31: mol_type = other RNA
ccaggacgggcacaaacacacacctcaaagc

SEQ ID NO: 16001 - RNA, 31 nt, synthetic construct
  source 1..31: mol_type = other RNA
caggcaaccacacgcacctccgagaggttcc

SEQ ID NO: 16002 - RNA, 31 nt, synthetic construct
  source 1..31: mol_type = other RNA
caaacacgcgcctcaaagcgattccgtccca

SEQ ID NO: 16003 - RNA, 30 nt, synthetic construct
  source 1..30: mol_type = other RNA
caaacacgcctctcacagggttccgtccca

SEQ ID NO: 16004 - RNA, 31 nt, synthetic construct
  source 1..31: mol_type = other RNA
caaacacaccactcaaagcggttccatccca

SEQ ID NO: 16005 - RNA, 46 nt, synthetic construct
  source 1..46: mol_type = other RNA
tctctaccaattaaaacacgagtcggacaggcagaaatacacacct

SEQ ID NO: 16006 - RNA, 31 nt, synthetic construct
  source 1..31: mol_type = other RNA
caggcaaacacacacacctcaaagtggttcc

SEQ ID NO: 16007 - RNA, 31 nt, synthetic construct
  source 1..31: mol_type = other RNA
ggacaggcacaaacgcacaccttaaagctgt

SEQ ID NO: 16008 - RNA, 31 nt, synthetic construct
  source 1..31: mol_type = other RNA
caggcacggacacgcgtctcaaagcggttcc

SEQ ID NO: 16009 - RNA, 31 nt, synthetic construct
  source 1..31: mol_type = other RNA
ccaggccaggcacggacacgcgtctcaaagc

SEQ ID NO: 16010 - RNA, 31 nt, synthetic construct
  source 1..31: mol_type = other RNA
caaacacgcgtctcaaagcggttccgtccca

SEQ ID NO: 16011 - RNA, 32 nt, synthetic construct
  source 1..32: mol_type = other RNA
tctctaccaggacaggcaaaaacacagcacct

SEQ ID NO: 16012 - RNA, 31 nt, synthetic construct
  source 1..31: mol_type = other RNA
ggacagggacgaacacgcatctcaaagctgt

SEQ ID NO: 16013 - RNA, 31 nt, synthetic construct
  source 1..31: mol_type = other RNA
ggacaggcgcaaaaacgcagctcaaagctgt

SEQ ID NO: 16014 - RNA, 30 nt, synthetic construct
  source 1..30: mol_type = other RNA
ccaggacaggcccaaatgcgcacccaaagc

SEQ ID NO: 16015 - RNA, 31 nt, synthetic construct
  source 1..31: mol_type = other RNA
ccaggatgggcacgagaccccacctcaaagc

SEQ ID NO: 16016 - RNA, 31 nt, synthetic construct
  source 1..31: mol_type = other RNA
caaacacgcacggtaaagcggttcagtccca

SEQ ID NO: 16017 - RNA, 31 nt, synthetic construct
  source 1..31: mol_type = other RNA
caaacacgcacgcaaaagcggttcagtccca

SEQ ID NO: 16018 - RNA, 31 nt, synthetic construct
  source 1..31: mol_type = other RNA
caggcacgaacacgcacctcaaagtggttcc

SEQ ID NO: 16019 - RNA, 31 nt, synthetic construct
  source 1..31: mol_type = other RNA
caggcacagacacccacctcaaagaggttcc

SEQ ID NO: 16020 - RNA, 31 nt, synthetic construct
  source 1..31: mol_type = other RNA
caaacacacagcccaaggcgctaccgtccca

SEQ ID NO: 16021 - RNA, 31 nt, synthetic construct
  source 1..31: mol_type = other RNA
caggcacgaacacgcgtctcaaagcggttcc

SEQ ID NO: 16022 - RNA, 33 nt, synthetic construct
  source 1..33: mol_type = other RNA
ccaggacaggaacaagcgcgaacctttcaaagc

SEQ ID NO: 16023 - RNA, 31 nt, synthetic construct
  source 1..31: mol_type = other RNA
caaacgcgaacctttcagcggttccgtccca

SEQ ID NO: 16024 - RNA, 31 nt, synthetic construct
  source 1..31: mol_type = other RNA
ccaggaatggcgcgaacacactcctcaaagc

SEQ ID NO: 16025 - RNA, 31 nt, synthetic construct
  source 1..31: mol_type = other RNA
caaacccgcccctcaaagcggttcagtccca

SEQ ID NO: 16026 - RNA, 31 nt, synthetic construct
  source 1..31: mol_type = other RNA
ggacaggctcaaacgcgcacttcaaagctgt

SEQ ID NO: 16027 - RNA, 31 nt, synthetic construct
  source 1..31: mol_type = other RNA
caaacacacacccaaaagtggttccgtccca

SEQ ID NO: 16028 - RNA, 30 nt, synthetic construct
  source 1..30: mol_type = other RNA
ggacaggataaacacgcgccccaacgctgt

SEQ ID NO: 16029 - RNA, 31 nt, synthetic construct
  source 1..31: mol_type = other RNA
caaacacgcacctcaaagtggttcagtccca

SEQ ID NO: 16030 - RNA, 31 nt, synthetic construct
  source 1..31: mol_type = other RNA
caggcagaaacacaccaatcaaagaggttcc

SEQ ID NO: 16031 - RNA, 30 nt, synthetic construct
  source 1..30: mol_type = other RNA
caaacacaccaatcaaagaggttcctccca

SEQ ID NO: 16032 - RNA, 41 nt, synthetic construct
  source 1..41: mol_type = other RNA
cccaggacaggcagaaacacaccaatcaaagaggttccgtc

SEQ ID NO: 16033 - RNA, 31 nt, synthetic construct
  source 1..31: mol_type = other RNA
caggcataaacgcgcacttcaattgggttcc

SEQ ID NO: 16034 - RNA, 31 nt, synthetic construct
  source 1..31: mol_type = other RNA
caaacgcgcacttcaattgggttccgtccca

SEQ ID NO: 16035 - RNA, 31 nt, synthetic construct
  source 1..31: mol_type = other RNA
caggcacgaacacgcacctcaaaacggttcc

SEQ ID NO: 16036 - RNA, 41 nt, synthetic construct
  source 1..41: mol_type = other RNA
acaggcacaagcacaccaaccgtaacgcggtcgtcccagta

SEQ ID NO: 16037 - RNA, 30 nt, synthetic construct
  source 1..30: mol_type = other RNA
caaacacgcacctcaaagaggttcgtccca

SEQ ID NO: 16038 - RNA, 31 nt, synthetic construct
  source 1..31: mol_type = other RNA
caggcagaaatgcgcacctcaaagtggttcc

SEQ ID NO: 16039 - RNA, 31 nt, synthetic construct
  source 1..31: mol_type = other RNA
caaacacgctcctcgaagaggttacgtccca

SEQ ID NO: 16040 - RNA, 31 nt, synthetic construct
  source 1..31: mol_type = other RNA
ccaggaaaggcgcgaacacgctcctcaaagc

SEQ ID NO: 16041 - RNA, 31 nt, synthetic construct
  source 1..31: mol_type = other RNA
ggacaggcgcacacacgcgtctcaacgctgt

SEQ ID NO: 16042 - RNA, 41 nt, synthetic construct
  source 1..41: mol_type = other RNA
gcacaaacacgtacctcatagcggttccggtccagtagatt

SEQ ID NO: 16043 - RNA, 31 nt, synthetic construct
  source 1..31: mol_type = other RNA
ggacaggcaaaaacacagccctcacagctgt

SEQ ID NO: 16044 - RNA, 31 nt, synthetic construct
  source 1..31: mol_type = other RNA
caaacacagccctcacagcggttccgtccca

SEQ ID NO: 16045 - RNA, 35 nt, synthetic construct
  source 1..35: mol_type = other RNA
ggacaaaagcacacaaacacgcacccaaaagctgt

SEQ ID NO: 16046 - RNA, 32 nt, synthetic construct
  source 1..32: mol_type = other RNA
caggcctcaaaaacaatcatcacagcggttcc

SEQ ID NO: 16047 - RNA, 32 nt, synthetic construct
  source 1..32: mol_type = other RNA
ggacaggactcaaaaacaatcatcacagctgt

SEQ ID NO: 16048 - RNA, 30 nt, synthetic construct
  source 1..30: mol_type = other RNA
ccaggaaaggcacgaacacacacccaaagc

SEQ ID NO: 16049 - RNA, 31 nt, synthetic construct
  source 1..31: mol_type = other RNA
caggcccaaatgcgcacccaaccgcggttcc

SEQ ID NO: 16050 - RNA, 31 nt, synthetic construct
  source 1..31: mol_type = other RNA
ccagggcaggcacagacacccacctcaaagc

SEQ ID NO: 16051 - RNA, 31 nt, synthetic construct
  source 1..31: mol_type = other RNA
ggacaggcacagacacccacctcaaagctgt

SEQ ID NO: 16052 - RNA, 31 nt, synthetic construct
  source 1..31: mol_type = other RNA
caggcacgaacacgcacctcaaagcggttcc

SEQ ID NO: 16053 - RNA, 31 nt, synthetic construct
  source 1..31: mol_type = other RNA
caggcatgaacacactcctcaaggcggttcc

SEQ ID NO: 16054 - RNA, 31 nt, synthetic construct
  source 1..31: mol_type = other RNA
ggacaggcaaaaacacaccactcaaagctgt

SEQ ID NO: 16055 - RNA, 31 nt, synthetic construct
  source 1..31: mol_type = other RNA
ggacaggccgaaacacgcacctcaaagctgt

SEQ ID NO: 16056 - RNA, 31 nt, synthetic construct
  source 1..31: mol_type = other RNA
ggacaggcgcgaacacgcacctcaaagctgt

SEQ ID NO: 16057 - RNA, 31 nt, synthetic construct
  source 1..31: mol_type = other RNA
caggcaagaacgcgcacctcaaagcggttcc

SEQ ID NO: 16058 - RNA, 41 nt, synthetic construct
  source 1..41: mol_type = other RNA
acaggcacaaacgcgcacttcaattgggttccgtcccagta

SEQ ID NO: 16059 - RNA, 31 nt, synthetic construct
  source 1..31: mol_type = other RNA
ccaggacaggcccaaatgcgcatctcaaagc

SEQ ID NO: 16060 - RNA, 33 nt, synthetic construct
  source 1..33: mol_type = other RNA
ccaggacaggtctaagcacaccaaccgtaaagc

SEQ ID NO: 16061 - RNA, 31 nt, synthetic construct
  source 1..31: mol_type = other RNA
caggcagaaatacaccactcaaagcggttcc

SEQ ID NO: 16062 - RNA, 31 nt, synthetic construct
  source 1..31: mol_type = other RNA
caggcacaaacgcacaccttaaagcggttcc

SEQ ID NO: 16063 - RNA, 31 nt, synthetic construct
  source 1..31: mol_type = other RNA
caaacgcacaccttaaagcggttccgtccca

SEQ ID NO: 16064 - RNA, 31 nt, synthetic construct
  source 1..31: mol_type = other RNA
caggcacaaatgcacaccttaaagcggttcc

SEQ ID NO: 16065 - RNA, 31 nt, synthetic construct
  source 1..31: mol_type = other RNA
ggacaggcacggacacgcgtctcaaagctgt

SEQ ID NO: 16066 - RNA, 31 nt, synthetic construct
  source 1..31: mol_type = other RNA
caggcacaaatacacacctaaaagcggttcc

SEQ ID NO: 16067 - RNA, 31 nt, synthetic construct
  source 1..31: mol_type = other RNA
caaacacgtacctcatagcggttccgtccca

SEQ ID NO: 16068 - RNA, 31 nt, synthetic construct
  source 1..31: mol_type = other RNA
caggcgcaaaaacgccgctcaaagcggttcc

SEQ ID NO: 16069 - RNA, 31 nt, synthetic construct
  source 1..31: mol_type = other RNA
caggcaaaaacacagccctcacagcggttcc

SEQ ID NO: 16070 - RNA, 31 nt, synthetic construct
  source 1..31: mol_type = other RNA
caaacgcgcacttcaaagtggttccgtccca

SEQ ID NO: 16071 - RNA, 31 nt, synthetic construct
  source 1..31: mol_type = other RNA
caaacgcgcacccaaccgcggttccgtccca

SEQ ID NO: 16072 - RNA, 41 nt, synthetic construct
  source 1..41: mol_type = other RNA
cccaggacaggcccaaatgcgcacccaaccgcggttccgtc

SEQ ID NO: 16073 - RNA, 30 nt, synthetic construct
  source 1..30: mol_type = other RNA
caggccaaatgcgcacctcaaagcggttcc

SEQ ID NO: 16074 - RNA, 41 nt, synthetic construct
  source 1..41: mol_type = other RNA
caaacacacacctcaaaaaggtttacaaaataaccgtccca

SEQ ID NO: 16075 - RNA, 41 nt, synthetic construct
  source 1..41: mol_type = other RNA
acaggcaccaaagcgcacgtcaaagcggttcagtcccagta

SEQ ID NO: 16076 - RNA, 31 nt, synthetic construct
  source 1..31: mol_type = other RNA
ccaggacaggcaaaaacacaccactcaaagc

SEQ ID NO: 16077 - RNA, 30 nt, synthetic construct
  source 1..30: mol_type = other RNA
caaacgcgcacctcaagtggttccgtccca

SEQ ID NO: 16078 - RNA, 30 nt, synthetic construct
  source 1..30: mol_type = other RNA
caggcacgaacacgcctctcacagggttcc

SEQ ID NO: 16079 - RNA, 41 nt, synthetic construct
  source 1..41: mol_type = other RNA
acaggcacaaatacaccactcaaagcggttccatcccagta

SEQ ID NO: 16080 - RNA, 31 nt, synthetic construct
  source 1..31: mol_type = other RNA
ggacaggcaaacacacacacctcaaagctgt

SEQ ID NO: 16081 - RNA, 31 nt, synthetic construct
  source 1..31: mol_type = other RNA
caggcgcaaaaacgcagctcaaagcggttcc

SEQ ID NO: 16082 - RNA, 31 nt, synthetic construct
  source 1..31: mol_type = other RNA
caaacacaatcatcacagcggttcagtccca

SEQ ID NO: 16083 - RNA, 41 nt, synthetic construct
  source 1..41: mol_type = other RNA
gcgccggtcaacaccaggagaggcagaaatactcacctcaa

SEQ ID NO: 16084 - RNA, 41 nt, synthetic construct; identical to SEQ ID NO: 2871
  source 1..41: mol_type = other RNA

SEQ ID NO: 16085 - RNA, 41 nt, synthetic construct; identical to SEQ ID NO: 1874
  source 1..41: mol_type = other RNA

SEQ ID NO: 16086 - RNA, 41 nt, synthetic construct; identical to SEQ ID NO: 1217
  source 1..41: mol_type = other RNA

SEQ ID NO: 16087 - RNA, 41 nt, synthetic construct; identical to SEQ ID NO: 2872
  source 1..41: mol_type = other RNA

SEQ ID NO: 16088 - RNA, 41 nt, synthetic construct; identical to SEQ ID NO: 1226
  source 1..41: mol_type = other RNA

SEQ ID NO: 16089 - RNA, 41 nt, synthetic construct; identical to SEQ ID NO: 1873
  source 1..41: mol_type = other RNA

SEQ ID NO: 16090 - RNA, 41 nt, synthetic construct; identical to SEQ ID NO: 2873
  source 1..41: mol_type = other RNA

SEQ ID NO: 16091 - RNA, 41 nt, synthetic construct; identical to SEQ ID NO: 1875
  source 1..41: mol_type = other RNA

SEQ ID NO: 16092 - RNA, 41 nt, synthetic construct; identical to SEQ ID NO: 1220
  source 1..41: mol_type = other RNA

SEQ ID NO: 16093 - RNA, 41 nt, synthetic construct; identical to SEQ ID NO: 1208
  source 1..41: mol_type = other RNA

SEQ ID NO: 16094 - RNA, 42 nt, synthetic construct; identical to SEQ ID NO: 2870
  source 1..42: mol_type = other RNA

SEQ ID NO: 16095 - RNA, 42 nt, synthetic construct; identical to SEQ ID NO: 1949
  source 1..42: mol_type = other RNA

SEQ ID NO: 16096 - RNA, 41 nt, synthetic construct; identical to SEQ ID NO: 2883
  source 1..41: mol_type = other RNA

SEQ ID NO: 16097 - RNA, 41 nt, synthetic construct; identical to SEQ ID NO: 1909
  source 1..41: mol_type = other RNA

SEQ ID NO: 16098 - RNA, 41 nt, synthetic construct; identical to SEQ ID NO: 1207
  source 1..41: mol_type = other RNA

SEQ ID NO: 16099 - RNA, 40 nt, synthetic construct; identical to SEQ ID NO: 1891
  source 1..40: mol_type = other RNA

SEQ ID NO: 16100 - RNA, 40 nt, synthetic construct; identical to SEQ ID NO: 1206
  source 1..40: mol_type = other RNA

SEQ ID NO: 16101 - RNA, 40 nt, synthetic construct; identical to SEQ ID NO: 2913
  source 1..40: mol_type = other RNA

SEQ ID NO: 16102 - RNA, 41 nt, synthetic construct; identical to SEQ ID NO: 1218
  source 1..41: mol_type = other RNA

SEQ ID NO: 16103 - RNA, 41 nt, synthetic construct; identical to SEQ ID NO: 2891
  source 1..41: mol_type = other RNA

SEQ ID NO: 16104 - RNA, 41 nt, synthetic construct; identical to SEQ ID NO: 1878
  source 1..41: mol_type = other RNA

SEQ ID NO: 16105 - RNA, 41 nt, synthetic construct; identical to SEQ ID NO: 1229
  source 1..41: mol_type = other RNA

SEQ ID NO: 16106 - RNA, 41 nt, synthetic construct; identical to SEQ ID NO: 1890
  source 1..41: mol_type = other RNA

SEQ ID NO: 16107 - RNA, 41 nt, synthetic construct; identical to SEQ ID NO: 2886
  source 1..41: mol_type = other RNA

SEQ ID NO: 16108 - RNA, 41 nt, synthetic construct; identical to SEQ ID NO: 1880
  source 1..41: mol_type = other RNA

SEQ ID NO: 16109 - RNA, 41 nt, synthetic construct; identical to SEQ ID NO: 2881
  source 1..41: mol_type = other RNA

SEQ ID NO: 16110 - RNA, 41 nt, synthetic construct; identical to SEQ ID NO: 1275
  source 1..41: mol_type = other RNA

SEQ ID NO: 16111 - RNA, 41 nt, synthetic construct; identical to SEQ ID NO: 2880
  source 1..41: mol_type = other RNA

SEQ ID NO: 16112 - RNA, 41 nt, synthetic construct; identical to SEQ ID NO: 1233
  source 1..41: mol_type = other RNA

SEQ ID NO: 16113 - RNA, 41 nt, synthetic construct; identical to SEQ ID NO: 1900
  source 1..41: mol_type = other RNA

SEQ ID NO: 16114 - RNA, 41 nt, synthetic construct; identical to SEQ ID NO: 1872
  source 1..41: mol_type = other RNA

SEQ ID NO: 16115 - RNA, 41 nt, synthetic construct; identical to SEQ ID NO: 1241
  source 1..41: mol_type = other RNA

SEQ ID NO: 16116 - RNA, 41 nt, synthetic construct; identical to SEQ ID NO: 2943
  source 1..41: mol_type = other RNA

SEQ ID NO: 16117 - RNA, 41 nt, synthetic construct; identical to SEQ ID NO: 2888
  source 1..41: mol_type = other RNA

SEQ ID NO: 16118 - RNA, 41 nt, synthetic construct; identical to SEQ ID NO: 1263
  source 1..41: mol_type = other RNA

SEQ ID NO: 16119 - RNA, 41 nt, synthetic construct; identical to SEQ ID NO: 1879
  source 1..41: mol_type = other RNA

SEQ ID NO: 16120 - RNA, 41 nt, synthetic construct; identical to SEQ ID NO: 1277
  source 1..41: mol_type = other RNA

SEQ ID NO: 16121 - RNA, 41 nt, synthetic construct; identical to SEQ ID NO: 2877
  source 1..41: mol_type = other RNA

SEQ ID NO: 16122 - RNA, 41 nt, synthetic construct; identical to SEQ ID NO: 1905
  source 1..41: mol_type = other RNA

SEQ ID NO: 16123 - RNA, 41 nt, synthetic construct; identical to SEQ ID NO: 1375
  source 1..41: mol_type = other RNA

SEQ ID NO: 16124 - RNA, 41 nt, synthetic construct; identical to SEQ ID NO: 1902
  source 1..41: mol_type = other RNA

SEQ ID NO: 16125 - RNA, 41 nt, synthetic construct; identical to SEQ ID NO: 2874
  source 1..41: mol_type = other RNA

SEQ ID NO: 16126 - RNA, 41 nt, synthetic construct; identical to SEQ ID NO: 1910
  source 1..41: mol_type = other RNA

SEQ ID NO: 16127 - RNA, 41 nt, synthetic construct; identical to SEQ ID NO: 2909
  source 1..41: mol_type = other RNA

SEQ ID NO: 16128 - RNA, 41 nt, synthetic construct; identical to SEQ ID NO: 1222
  source 1..41: mol_type = other RNA

SEQ ID NO: 16129 - RNA, 41 nt, synthetic construct; identical to SEQ ID NO: 1228
  source 1..41: mol_type = other RNA

SEQ ID NO: 16130 - RNA, 41 nt, synthetic construct; identical to SEQ ID NO: 1913
  source 1..41: mol_type = other RNA

SEQ ID NO: 16131 - RNA, 41 nt, synthetic construct; identical to SEQ ID NO: 2903
  source 1..41: mol_type = other RNA

SEQ ID NO: 16132 - RNA, 41 nt, synthetic construct; identical to SEQ ID NO: 2896
  source 1..41: mol_type = other RNA

SEQ ID NO: 16133 - RNA, 41 nt, synthetic construct; identical to SEQ ID NO: 1252
  source 1..41: mol_type = other RNA

SEQ ID NO: 16134 - RNA, 41 nt, synthetic construct; identical to SEQ ID NO: 1897
  source 1..41: mol_type = other RNA

SEQ ID NO: 16135 - RNA, 41 nt, synthetic construct; identical to SEQ ID NO: 2895
  source 1..41: mol_type = other RNA

SEQ ID NO: 16136 - RNA, 41 nt, synthetic construct; identical to SEQ ID NO: 1884
  source 1..41: mol_type = other RNA

SEQ ID NO: 16137 - RNA, 41 nt, synthetic construct; identical to SEQ ID NO: 1298
  source 1..41: mol_type = other RNA

SEQ ID NO: 16138 - RNA, 41 nt, synthetic construct; identical to SEQ ID NO: 2971
  source 1..41: mol_type = other RNA

SEQ ID NO: 16139 - RNA, 41 nt, synthetic construct; identical to SEQ ID NO: 1883
  source 1..41: mol_type = other RNA

SEQ ID NO: 16140 - RNA, 41 nt, synthetic construct; identical to SEQ ID NO: 1232
  source 1..41: mol_type = other RNA

SEQ ID NO: 16141 - RNA, 41 nt, synthetic construct; identical to SEQ ID NO: 2900
  source 1..41: mol_type = other RNA

SEQ ID NO: 16142 - RNA, 41 nt, synthetic construct; identical to SEQ ID NO: 1296
  source 1..41: mol_type = other RNA

SEQ ID NO: 16143 - RNA, 41 nt, synthetic construct; identical to SEQ ID NO: 1882
  source 1..41: mol_type = other RNA

SEQ ID NO: 16144 - RNA, 43 nt, synthetic construct; identical to SEQ ID NO: 2904
  source 1..43: mol_type = other RNA

SEQ ID NO: 16145 - RNA, 43 nt, synthetic construct; identical to SEQ ID NO: 1221
  source 1..43: mol_type = other RNA

SEQ ID NO: 16146 - RNA, 43 nt, synthetic construct; identical to SEQ ID NO: 1927
  source 1..43: mol_type = other RNA

SEQ ID NO: 16147 - RNA, 41 nt, synthetic construct; identical to SEQ ID NO: 1995
  source 1..41: mol_type = other RNA

SEQ ID NO: 16148 - RNA, 41 nt, synthetic construct; identical to SEQ ID NO: 2879
  source 1..41: mol_type = other RNA

SEQ ID NO: 16149 - RNA, 41 nt, synthetic construct; identical to SEQ ID NO: 1227
  source 1..41: mol_type = other RNA

SEQ ID NO: 16150 - RNA, 41 nt, synthetic construct; identical to SEQ ID NO: 1304
  source 1..41: mol_type = other RNA

SEQ ID NO: 16151 - RNA, 41 nt, synthetic construct; identical to SEQ ID NO: 1932
  source 1..41: mol_type = other RNA

SEQ ID NO: 16152 - RNA, 41 nt, synthetic construct; identical to SEQ ID NO: 2876
  source 1..41: mol_type = other RNA

SEQ ID NO: 16153 - RNA, 41 nt, synthetic construct; identical to SEQ ID NO: 1283
  source 1..41: mol_type = other RNA

SEQ ID NO: 16154 - RNA, 41 nt, synthetic construct; identical to SEQ ID NO: 2884
  source 1..41: mol_type = other RNA

SEQ ID NO: 16155 - RNA, 41 nt, synthetic construct; identical to SEQ ID NO: 1921
  source 1..41: mol_type = other RNA

SEQ ID NO: 16156 - RNA, 43 nt, synthetic construct; identical to SEQ ID NO: 1929
  source 1..43: mol_type = other RNA

SEQ ID NO: 16157 - RNA, 41 nt, synthetic construct; identical to SEQ ID NO: 1212
  source 1..41: mol_type = other RNA

SEQ ID NO: 16158 - RNA, 41 nt, synthetic construct; identical to SEQ ID NO: 2953
  source 1..41: mol_type = other RNA

SEQ ID NO: 16159 - RNA, 42 nt, synthetic construct; identical to SEQ ID NO: 1235
  source 1..42: mol_type = other RNA

SEQ ID NO: 16160 - RNA, 42 nt, synthetic construct; identical to SEQ ID NO: 1885
  source 1..42: mol_type = other RNA

SEQ ID NO: 16161 - RNA, 42 nt, synthetic construct; identical to SEQ ID NO: 3028
  source 1..42: mol_type = other RNA

SEQ ID NO: 16162 - RNA, 41 nt, synthetic construct; identical to SEQ ID NO: 1244
  source 1..41: mol_type = other RNA

SEQ ID NO: 16163 - RNA, 41 nt, synthetic construct; identical to SEQ ID NO: 1881
  source 1..41: mol_type = other RNA

SEQ ID NO: 16164 - RNA, 41 nt, synthetic construct; identical to SEQ ID NO: 3035
  source 1..41: mol_type = other RNA

SEQ ID NO: 16165 - RNA, 41 nt, synthetic construct; identical to SEQ ID NO: 1944
  source 1..41: mol_type = other RNA

SEQ ID NO: 16166 - RNA, 40 nt, synthetic construct; identical to SEQ ID NO: 2982
  source 1..40: mol_type = other RNA

SEQ ID NO: 16167 - RNA, 41 nt, synthetic construct; identical to SEQ ID NO: 1210
  source 1..41: mol_type = other RNA

SEQ ID NO: 16168 - RNA, 41 nt, synthetic construct; identical to SEQ ID NO: 1224
  source 1..41: mol_type = other RNA

SEQ ID NO: 16169 - RNA, 41 nt, synthetic construct; identical to SEQ ID NO: 3101
  source 1..41: mol_type = other RNA

SEQ ID NO: 16170 - RNA, 41 nt, synthetic construct; identical to SEQ ID NO: 1892
  source 1..41: mol_type = other RNA

SEQ ID NO: 16171 - RNA, 41 nt, synthetic construct; identical to SEQ ID NO: 1251
  source 1..41: mol_type = other RNA

SEQ ID NO: 16172 - RNA, 41 nt, synthetic construct; identical to SEQ ID NO: 2887
  source 1..41: mol_type = other RNA

SEQ ID NO: 16173 - RNA, 41 nt, synthetic construct; identical to SEQ ID NO: 1978
  source 1..41: mol_type = other RNA

SEQ ID NO: 16174 - RNA, 41 nt, synthetic construct; identical to SEQ ID NO: 1919
  source 1..41: mol_type = other RNA

SEQ ID NO: 16175 - RNA, 41 nt, synthetic construct; identical to SEQ ID NO: 2959
  source 1..41: mol_type = other RNA

SEQ ID NO: 16176 - RNA, 41 nt, synthetic construct; identical to SEQ ID NO: 1240
  source 1..41: mol_type = other RNA

SEQ ID NO: 16177 - RNA, 41 nt, synthetic construct; identical to SEQ ID NO: 1952
  source 1..41: mol_type = other RNA

SEQ ID NO: 16178 - RNA, 41 nt, synthetic construct; identical to SEQ ID NO: 2908
  source 1..41: mol_type = other RNA

SEQ ID NO: 16179 - RNA, 41 nt, synthetic construct; identical to SEQ ID NO: 1236
  source 1..41: mol_type = other RNA

SEQ ID NO: 16180 - RNA, 41 nt, synthetic construct; identical to SEQ ID NO: 1223
  source 1..41: mol_type = other RNA

SEQ ID NO: 16181 - RNA, 31 nt, synthetic construct; identical to SEQ ID NO: 1912
  source 1..31: mol_type = other RNA

SEQ ID NO: 16182 - RNA, 41 nt, synthetic construct; identical to SEQ ID NO: 3137
  source 1..41: mol_type = other RNA

SEQ ID NO: 16183 - RNA, 44 nt, synthetic construct; identical to SEQ ID NO: 1322
  source 1..44: mol_type = other RNA

SEQ ID NO: 16184 - RNA, 41 nt, synthetic construct; identical to SEQ ID NO: 1898
  source 1..41: mol_type = other RNA

SEQ ID NO: 16185 - RNA, 41 nt, synthetic construct; identical to SEQ ID NO: 2912
  source 1..41: mol_type = other RNA

SEQ ID NO: 16186 - RNA, 41 nt, synthetic construct; identical to SEQ ID NO: 1361
  source 1..41: mol_type = other RNA

SEQ ID NO: 16187 - RNA, 41 nt, synthetic construct; identical to SEQ ID NO: 1907
  source 1..41: mol_type = other RNA

SEQ ID NO: 16188 - RNA, 41 nt, synthetic construct; identical to SEQ ID NO: 2901
  source 1..41: mol_type = other RNA

SEQ ID NO: 16189 - RNA, 41 nt, synthetic construct; identical to SEQ ID NO: 1323
  source 1..41: mol_type = other RNA

SEQ ID NO: 16190 - RNA, 41 nt, synthetic construct; identical to SEQ ID NO: 1895
  source 1..41: mol_type = other RNA

SEQ ID NO: 16191 - RNA, 41 nt, synthetic construct; identical to SEQ ID NO: 2922
  source 1..41: mol_type = other RNA

SEQ ID NO: 16192 - RNA, 41 nt, synthetic construct; identical to SEQ ID NO: 1308
  source 1..41: mol_type = other RNA

SEQ ID NO: 16193 - RNA, 41 nt, synthetic construct; identical to SEQ ID NO: 2897
  source 1..41: mol_type = other RNA

SEQ ID NO: 16194 - RNA, 41 nt, synthetic construct; identical to SEQ ID NO: 1933
  source 1..41: mol_type = other RNA

SEQ ID NO: 16195 - RNA, 42 nt, synthetic construct; identical to SEQ ID NO: 1954
  source 1..42: mol_type = other RNA

SEQ ID NO: 16196 - RNA, 32 nt, synthetic construct; identical to SEQ ID NO: 3147
  source 1..32: mol_type = other RNA

SEQ ID NO: 16197 - RNA, 42 nt, synthetic construct; identical to SEQ ID NO: 1211
  source 1..42: mol_type = other RNA

SEQ ID NO: 16198 - RNA, 41 nt, synthetic construct; identical to SEQ ID NO: 2905
  source 1..41: mol_type = other RNA

SEQ ID NO: 16199 - RNA, 41 nt, synthetic construct; identical to SEQ ID NO: 1953
  source 1..41: mol_type = other RNA

SEQ ID NO: 16200 - RNA, 41 nt, synthetic construct; identical to SEQ ID NO: 1265
  source 1..41: mol_type = other RNA

SEQ ID NO: 16201 - RNA, 41 nt, synthetic construct; identical to SEQ ID NO: 2944
  source 1..41: mol_type = other RNA

SEQ ID NO: 16202 - RNA, 41 nt, synthetic construct; identical to SEQ ID NO: 1941
  source 1..41: mol_type = other RNA

SEQ ID NO: 16203 - RNA, 41 nt, synthetic construct; identical to SEQ ID NO: 1242
  source 1..41: mol_type = other RNA

SEQ ID NO: 16204 - RNA, 41 nt, synthetic construct; identical to SEQ ID NO: 1259
  source 1..41: mol_type = other RNA

SEQ ID NO: 16205 - RNA, 42 nt, synthetic construct; identical to SEQ ID NO: 1908
  source 1..42: mol_type = other RNA

SEQ ID NO: 16206 - RNA, 41 nt, synthetic construct; identical to SEQ ID NO: 3047
  source 1..41: mol_type = other RNA

SEQ ID NO: 16207 - RNA, 41 nt, synthetic construct; identical to SEQ ID NO: 1906
  source 1..41: mol_type = other RNA

SEQ ID NO: 16208 - RNA, 41 nt, synthetic construct; identical to SEQ ID NO: 1285
  source 1..41: mol_type = other RNA

SEQ ID NO: 16209 - RNA, 41 nt, synthetic construct; identical to SEQ ID NO: 2969
  source 1..41: mol_type = other RNA

SEQ ID NO: 16210 - RNA, 41 nt, synthetic construct; identical to SEQ ID NO: 2004
  source 1..41: mol_type = other RNA

SEQ ID NO: 16211 - RNA, 41 nt, synthetic construct; identical to SEQ ID NO: 1213
  source 1..41: mol_type = other RNA

SEQ ID NO: 16212 - RNA, 41 nt, synthetic construct; identical to SEQ ID NO: 2956
  source 1..41: mol_type = other RNA

SEQ ID NO: 16213 - RNA, 41 nt, synthetic construct; identical to SEQ ID NO: 3018
  source 1..41: mol_type = other RNA

SEQ ID NO: 16214 - RNA, 41 nt, synthetic construct; identical to SEQ ID NO: 1894
  source 1..41: mol_type = other RNA

SEQ ID NO: 16215 - RNA, 41 nt, synthetic construct; identical to SEQ ID NO: 2918
  source 1..41: mol_type = other RNA

SEQ ID NO: 16216 - RNA, 44 nt, synthetic construct; identical to SEQ ID NO: 1914
  source 1..44: mol_type = other RNA

SEQ ID NO: 16217 - RNA, 44 nt, synthetic construct; identical to SEQ ID NO: 1342
  source 1..44: mol_type = other RNA

SEQ ID NO: 16218 - RNA, 42 nt, synthetic construct; identical to SEQ ID NO: 1243
  source 1..42: mol_type = other RNA

SEQ ID NO: 16219 - RNA, 32 nt, synthetic construct; identical to SEQ ID NO: 2165
  source 1..32: mol_type = other RNA

SEQ ID NO: 16220 - RNA, 41 nt, synthetic construct; identical to SEQ ID NO: 2017
  source 1..41: mol_type = other RNA

SEQ ID NO: 16221 - RNA, 41 nt, synthetic construct; identical to SEQ ID NO: 2885
  source 1..41: mol_type = other RNA

SEQ ID NO: 16222 - RNA, 41 nt, synthetic construct; identical to SEQ ID NO: 1293
  source 1..41: mol_type = other RNA

SEQ ID NO: 16223 - RNA, 31 nt, synthetic construct; identical to SEQ ID NO: 1917
  source 1..31: mol_type = other RNA

SEQ ID NO: 16224 - RNA, 41 nt, synthetic construct; identical to SEQ ID NO: 1310
  source 1..41: mol_type = other RNA

SEQ ID NO: 16225 - RNA, 42 nt, synthetic construct; identical to SEQ ID NO: 2937
  source 1..42: mol_type = other RNA

SEQ ID NO: 16226 - RNA, 31 nt, synthetic construct; identical to SEQ ID NO: 1936
  source 1..31: mol_type = other RNA

SEQ ID NO: 16227 - RNA, 41 nt, synthetic construct; identical to SEQ ID NO: 1320
  source 1..41: mol_type = other RNA

SEQ ID NO: 16228 - RNA, 41 nt, synthetic construct; identical to SEQ ID NO: 2910
  source 1..41: mol_type = other RNA

SEQ ID NO: 16229 - RNA, 41 nt, synthetic construct; identical to SEQ ID NO: 1937
  source 1..41: mol_type = other RNA

SEQ ID NO: 16230 - RNA, 41 nt, synthetic construct; identical to SEQ ID NO: 2940
  source 1..41: mol_type = other RNA

SEQ ID NO: 16231 - RNA, 41 nt, synthetic construct; identical to SEQ ID NO: 1278
  source 1..41: mol_type = other RNA

SEQ ID NO: 16232 - RNA, 41 nt, synthetic construct; identical to SEQ ID NO: 1295
  source 1..41: mol_type = other RNA

SEQ ID NO: 16233 - RNA, 41 nt, synthetic construct; identical to SEQ ID NO: 2898
  source 1..41: mol_type = other RNA

SEQ ID NO: 16234 - RNA, 41 nt, synthetic construct; identical to SEQ ID NO: 1981
  source 1..41: mol_type = other RNA

SEQ ID NO: 16235 - RNA, 41 nt, synthetic construct; identical to SEQ ID NO: 1305
  source 1..41: mol_type = other RNA

SEQ ID NO: 16236 - RNA, 41 nt, synthetic construct; identical to SEQ ID NO: 2902
  source 1..41: mol_type = other RNA

SEQ ID NO: 16237 - RNA, 41 nt, synthetic construct; identical to SEQ ID NO: 1969
  source 1..41: mol_type = other RNA

SEQ ID NO: 16238 - RNA, 41 nt, synthetic construct; identical to SEQ ID NO: 1916
  source 1..41: mol_type = other RNA

SEQ ID NO: 16239 - RNA, 41 nt, synthetic construct; identical to SEQ ID NO: 2974
  source 1..41: mol_type = other RNA

SEQ ID NO: 16240 - RNA, 41 nt, synthetic construct; identical to SEQ ID NO: 1311
  source 1..41: mol_type = other RNA

SEQ ID NO: 16241 - RNA, 42 nt, synthetic construct; identical to SEQ ID NO: 1979
  source 1..42: mol_type = other RNA

SEQ ID NO: 16242 - RNA, 42 nt, synthetic construct; identical to SEQ ID NO: 1273
  source 1..42: mol_type = other RNA

SEQ ID NO: 16243 - RNA, 42 nt, synthetic construct; identical to SEQ ID NO: 2916
  source 1..42: mol_type = other RNA

SEQ ID NO: 16244 - RNA, 41 nt, synthetic construct; identical to SEQ ID NO: 2894
  source 1..41: mol_type = other RNA

SEQ ID NO: 16245 - RNA, 40 nt, synthetic construct; identical to SEQ ID NO: 2014
  source 1..40: mol_type = other RNA

SEQ ID NO: 16246 - RNA, 40 nt, synthetic construct; identical to SEQ ID NO: 1317
  source 1..40: mol_type = other RNA

SEQ ID NO: 16247 - RNA, 47 nt, synthetic construct; identical to SEQ ID NO: 2003
  source 1..47: mol_type = other RNA

SEQ ID NO: 16248 - RNA, 47 nt, synthetic construct; identical to SEQ ID NO: 1246
  source 1..47: mol_type = other RNA

SEQ ID NO: 16249 - RNA, 47 nt, synthetic construct; identical to SEQ ID NO: 2964
  source 1..47: mol_type = other RNA

SEQ ID NO: 16250 - RNA, 31 nt, synthetic construct; identical to SEQ ID NO: 1994
  source 1..31: mol_type = other RNA

SEQ ID NO: 16251 - RNA, 41 nt, synthetic construct; identical to SEQ ID NO: 1257
  source 1..41: mol_type = other RNA

SEQ ID NO: 16252 - RNA, 41 nt, synthetic construct; identical to SEQ ID NO: 2968
  source 1..41: mol_type = other RNA

SEQ ID NO: 16253 - RNA, 41 nt, synthetic construct; identical to SEQ ID NO: 1948
  source 1..41: mol_type = other RNA

SEQ ID NO: 16254 - RNA, 41 nt, synthetic construct; identical to SEQ ID NO: 1345
  source 1..41: mol_type = other RNA

SEQ ID NO: 16255 - RNA, 41 nt, synthetic construct; identical to SEQ ID NO: 2929
  source 1..41: mol_type = other RNA

SEQ ID NO: 16256 - RNA, 41 nt, synthetic construct; identical to SEQ ID NO: 1245
  source 1..41: mol_type = other RNA

SEQ ID NO: 16257 - RNA, 41 nt, synthetic construct; identical to SEQ ID NO: 2095
  source 1..41: mol_type = other RNA

SEQ ID NO: 16258 - RNA, 41 nt, synthetic construct; identical to SEQ ID NO: 2907
  source 1..41: mol_type = other RNA

SEQ ID NO: 16259 - RNA, 39 nt, synthetic construct; identical to SEQ ID NO: 1951
  source 1..39: mol_type = other RNA

SEQ ID NO: 16260 - RNA, 41 nt, synthetic construct; identical to SEQ ID NO: 2999
  source 1..41: mol_type = other RNA

SEQ ID NO: 16261 - RNA, 41 nt, synthetic construct; identical to SEQ ID NO: 1287
  source 1..41: mol_type = other RNA

SEQ ID NO: 16262 - RNA, 41 nt, synthetic construct; identical to SEQ ID NO: 1351
  source 1..41: mol_type = other RNA

SEQ ID NO: 16263 - RNA, 41 nt, synthetic construct; identical to SEQ ID NO: 1939
  source 1..41: mol_type = other RNA

SEQ ID NO: 16264 - RNA, 31 nt, synthetic construct; identical to SEQ ID NO: 2972
  source 1..31: mol_type = other RNA

SEQ ID NO: 16265 - RNA, 41 nt, synthetic construct; identical to SEQ ID NO: 1963
  source 1..41: mol_type = other RNA

SEQ ID NO: 16266 - RNA, 41 nt, synthetic construct; identical to SEQ ID NO: 1327
  source 1..41: mol_type = other RNA

SEQ ID NO: 16267 - RNA, 41 nt, synthetic construct; identical to SEQ ID NO: 2950
  source 1..41: mol_type = other RNA

SEQ ID NO: 16268 - RNA, 31 nt, synthetic construct; identical to SEQ ID NO: 1965
  source 1..31: mol_type = other RNA

SEQ ID NO: 16269 - RNA, 41 nt, synthetic construct; identical to SEQ ID NO: 2936
  source 1..41: mol_type = other RNA

SEQ ID NO: 16270 - RNA, 41 nt, synthetic construct; identical to SEQ ID NO: 1367
  source 1..41: mol_type = other RNA

SEQ ID NO: 16271 - RNA, 43 nt, synthetic construct; identical to SEQ ID NO: 2984
  source 1..43: mol_type = other RNA

SEQ ID NO: 16272 - RNA, 43 nt, synthetic construct; identical to SEQ ID NO: 1955
  source 1..43: mol_type = other RNA

SEQ ID NO: 16273 - RNA, 43 nt, synthetic construct; identical to SEQ ID NO: 1336
  source 1..43: mol_type = other RNA

SEQ ID NO: 16274 - RNA, 41 nt, synthetic construct; identical to SEQ ID NO: 2962
  source 1..41: mol_type = other RNA

SEQ ID NO: 16275 - RNA, 41 nt, synthetic construct; identical to SEQ ID NO: 1254
  source 1..41: mol_type = other RNA

SEQ ID NO: 16276 - RNA, 31 nt, synthetic construct; identical to SEQ ID NO: 2055
  source 1..31: mol_type = other RNA

SEQ ID NO: 16277 - RNA, 41 nt, synthetic construct; identical to SEQ ID NO: 2915
  source 1..41: mol_type = other RNA

SEQ ID NO: 16278 - RNA, 41 nt, synthetic construct; identical to SEQ ID NO: 2008
  source 1..41: mol_type = other RNA

SEQ ID NO: 16279 - RNA, 39 nt, synthetic construct; identical to SEQ ID NO: 3097
  source 1..39: mol_type = other RNA

SEQ ID NO: 16280 - RNA, 39 nt, synthetic construct; identical to SEQ ID NO: 1943
  source 1..39: mol_type = other RNA

SEQ ID NO: 16281 - RNA, 41 nt, synthetic construct; identical to SEQ ID NO: 1343
  source 1..41: mol_type = other RNA

SEQ ID NO: 16282 - RNA, 41 nt, synthetic construct; identical to SEQ ID NO: 1269
  source 1..41: mol_type = other RNA

SEQ ID NO: 16283 - RNA, 41 nt, synthetic construct; identical to SEQ ID NO: 3010
  source 1..41: mol_type = other RNA

SEQ ID NO: 16284 - RNA, 41 nt, synthetic construct; identical to SEQ ID NO: 2026
  source 1..41: mol_type = other RNA

SEQ ID NO: 16285 - RNA, 41 nt, synthetic construct; identical to SEQ ID NO: 2977
  source 1..41: mol_type = other RNA

SEQ ID NO: 16286 - RNA, 41 nt, synthetic construct; identical to SEQ ID NO: 2001
  source 1..41: mol_type = other RNA

SEQ ID NO: 16287 - RNA, 41 nt, synthetic construct; identical to SEQ ID NO: 1349
  source 1..41: mol_type = other RNA

SEQ ID NO: 16288 - RNA, 41 nt, synthetic construct; identical to SEQ ID NO: 3065
  source 1..41: mol_type = other RNA

SEQ ID NO: 16289 - RNA, 41 nt, synthetic construct; identical to SEQ ID NO: 1966
  source 1..41: mol_type = other RNA

SEQ ID NO: 16290 - RNA, 41 nt, synthetic construct; identical to SEQ ID NO: 1371
  source 1..41: mol_type = other RNA

SEQ ID NO: 16291 - RNA, 27 nt, synthetic construct
  source 1..27: mol_type = other RNA
ggtgtccaagcccattggagggagatt

SEQ ID NO: 16292 - RNA, 41 nt, synthetic construct; identical to SEQ ID NO: 1332
  source 1..41: mol_type = other RNA

SEQ ID NO: 16293 - RNA, 41 nt, synthetic construct; identical to SEQ ID NO: 3080
  source 1..41: mol_type = other RNA

SEQ ID NO: 16294 - RNA, 41 nt, synthetic construct; identical to SEQ ID NO: 2134
  source 1..41: mol_type = other RNA

SEQ ID NO: 16295 - RNA, 41 nt, synthetic construct; identical to SEQ ID NO: 2927
  source 1..41: mol_type = other RNA

SEQ ID NO: 16296 - RNA, 41 nt, synthetic construct; identical to SEQ ID NO: 1429
  source 1..41: mol_type = other RNA

SEQ ID NO: 16297 - RNA, 51 nt, synthetic construct
  source 1..51: mol_type = other RNA
catgggtgcccttggaaagtggtgccaagaagttgggggtgcaggaagtat

SEQ ID NO: 16298 - RNA, 51 nt, synthetic construct; identical to SEQ ID NO: 16297
  source 1..51: mol_type = other RNA
  modified_base 1..3: mod_base = OTHER; note = Locked nucleic acid modification at the 2' position
  modified_base 49..51: mod_base = OTHER; note = Locked nucleic acid modification at the 2' position
  modified_base 1..51: mod_base = OTHER; note = Thiophosphorylation modification

SEQ ID NO: 16299 - RNA, 58 nt, synthetic construct
  source 1..58: mol_type = other RNA
cgtggatgacattggcccggtgtagccaagcataaaaattggtgggtgcaggaggtat

SEQ ID NO: 16300 - RNA, 58 nt, synthetic construct; identical to SEQ ID NO: 16299
  source 1..58: mol_type = other RNA
  modified_base 1..3: mod_base = OTHER; note = Locked nucleic acid modification at the 2' position
  modified_base 56..58: mod_base = OTHER; note = Locked nucleic acid modification at the 2' position
  modified_base 1..58: mod_base = OTHER; note = Thiophosphorylation modification

SEQ ID NO: 16301 - RNA, 41 nt, synthetic construct
  source 1..41: mol_type = other RNA
atgaccttggccatgtgtgccaagcggtgagtggtgcagga

SEQ ID NO: 16302 - RNA, 41 nt, synthetic construct; identical to SEQ ID NO: 16301
  source 1..41: mol_type = other RNA
  modified_base 1..3: mod_base = OTHER; note = Locked nucleic acid modification at the 2' position
  modified_base 39..41: mod_base = OTHER; note = Locked nucleic acid modification at the 2' position
  modified_base 1..41: mod_base = OTHER; note = Thiophosphorylation modification

SEQ ID NO: 16303 - RNA, 41 nt, synthetic construct
  source 1..41: mol_type = other RNA
atgtccttggctatgggttccaagcggttggtggtgtagga

SEQ ID NO: 16304 - RNA, 41 nt, synthetic construct; identical to SEQ ID NO: 16303
  source 1..41: mol_type = other RNA
  modified_base 1..3: mod_base = OTHER; note = Locked nucleic acid modification at the 2' position
  modified_base 39..41: mod_base = OTHER; note = Locked nucleic acid modification at the 2' position
  modified_base 1..41: mod_base = OTHER; note = Thiophosphorylation modification

SEQ ID NO: 16305 - RNA, 51 nt, synthetic construct
  source 1..51: mol_type = other RNA
catggatgaccttagacaggggtgtcaagcaggtgcgggttcaggagttag

SEQ ID NO: 16306 - RNA, 51 nt, synthetic construct; identical to SEQ ID NO: 16305
  source 1..51: mol_type = other RNA
  modified_base 1..3: mod_base = OTHER; note = Locked nucleic acid modification at the 2' position
  modified_base 49..51: mod_base = OTHER; note = Locked nucleic acid modification at the 2' position
  modified_base 1..51: mod_base = OTHER; note = Thiophosphorylation modification

SEQ ID NO: 16307 - RNA, 41 nt, synthetic construct
  source 1..41: mol_type = other RNA
atgaccttagacaggggtgtcaagcaggtgcgggttcagga

SEQ ID NO: 16308 - RNA, 41 nt, synthetic construct; identical to SEQ ID NO: 16307
  source 1..41: mol_type = other RNA
  modified_base 1..3: mod_base = OTHER; note = Locked nucleic acid modification at the 2' position
  modified_base 39..41: mod_base = OTHER; note = Locked nucleic acid modification at the 2' position
  modified_base 1..41: mod_base = OTHER; note = Thiophosphorylation modification

SEQ ID NO: 16309 - RNA, 41 nt, synthetic construct
  source 1..41: mol_type = other RNA
atgtctttggcaatgggtgccaagatttggatggtgcagga

SEQ ID NO: 16310 - RNA, 41 nt, synthetic construct; identical to SEQ ID NO: 16309
  source 1..41: mol_type = other RNA
  modified_base 1..3: mod_base = OTHER; note = Locked nucleic acid modification at the 2' position
  modified_base 39..41: mod_base = OTHER; note = Locked nucleic acid modification at the 2' position
  modified_base 1..41: mod_base = OTHER; note = Thiophosphorylation modification

SEQ ID NO: 16311 - RNA, 52 nt, synthetic construct
  source 1..52: mol_type = other RNA
cagagatgaacttggttagggggtgccaagcagagaaggttgccctcggcat

SEQ ID NO: 16312 - RNA, 52 nt, synthetic construct; identical to SEQ ID NO: 16311
  source 1..52: mol_type = other RNA
  modified_base 1..3: mod_base = OTHER; note = Locked nucleic acid modification at the 2' position
  modified_base 50..52: mod_base = OTHER; note = Locked nucleic acid modification at the 2' position
  modified_base 1..52: mod_base = OTHER; note = Thiophosphorylation modification

SEQ ID NO: 16313 - RNA, 41 nt, synthetic construct
  source 1..41: mol_type = other RNA
atggccttggaaagggatgccaagcagttgggggttcaggg

SEQ ID NO: 16314 - RNA, 41 nt, synthetic construct; identical to SEQ ID NO: 16313
  source 1..41: mol_type = other RNA
  modified_base 1..3: mod_base = OTHER; note = Locked nucleic acid modification at the 2' position
  modified_base 39..41: mod_base = OTHER; note = Locked nucleic acid modification at the 2' position
  modified_base 1..41: mod_base = OTHER; note = Thiophosphorylation modification

SEQ ID NO: 16315 - RNA, 31 nt, synthetic construct
  source 1..31: mol_type = other RNA
cttggaaagggatgccaagcagttgggggtt

SEQ ID NO: 16316 - RNA, 31 nt, synthetic construct; identical to SEQ ID NO: 16315
  source 1..31: mol_type = other RNA
  modified_base 1..3: mod_base = OTHER; note = Locked nucleic acid modification at the 2' position
  modified_base 29..31: mod_base = OTHER; note = Locked nucleic acid modification at the 2' position
  modified_base 1..31: mod_base = OTHER; note = Thiophosphorylation modification

SEQ ID NO: 16317 - RNA, 41 nt, synthetic construct
  source 1..41: mol_type = other RNA
atgtccttggccatgggttccaagcgatgcgtggtgtggga

SEQ ID NO: 16318 - RNA, 41 nt, synthetic construct; identical to SEQ ID NO: 16317
  source 1..41: mol_type = other RNA
  modified_base 1..3: mod_base = OTHER; note = Locked nucleic acid modification at the 2' position
  modified_base 39..41: mod_base = OTHER; note = Locked nucleic acid modification at the 2' position
  modified_base 1..41: mod_base = OTHER; note = Thiophosphorylation modification

SEQ ID NO: 16319 - RNA, 41 nt, synthetic construct
  source 1..41: mol_type = other RNA
atgtctttggccatgggtgtcaagcggtgggtggtgtagga

SEQ ID NO: 16320 - RNA, 41 nt, synthetic construct; identical to SEQ ID NO: 16319
  source 1..41: mol_type = other RNA
  modified_base 1..3: mod_base = OTHER; note = Locked nucleic acid modification at the 2' position
  modified_base 39..41: mod_base = OTHER; note = Locked nucleic acid modification at the 2' position
  modified_base 1..41: mod_base = OTHER; note = Thiophosphorylation modification

SEQ ID NO: 16321 - RNA, 31 nt, synthetic construct
  source 1..31: mol_type = other RNA
ttcaagagagtagggcgggctccccaggccc

SEQ ID NO: 16322 - RNA, 31 nt, synthetic construct
  source 1..31: mol_type = other RNA
ttcaagagggtagggaggcctccccaggccc

SEQ ID NO: 16323 - RNA, 41 nt, synthetic construct
  source 1..41: mol_type = other RNA
agagagtagggagttctccccaggcttcccctgttattatg

SEQ ID NO: 16324 - RNA, 41 nt, synthetic construct
  source 1..41: mol_type = other RNA
agagagtagggcgggctccccaggcccttccttttattatg

SEQ ID NO: 16325 - RNA, 41 nt, synthetic construct
  source 1..41: mol_type = other RNA
agagagtaggtaggggtccccaggcccctcctgttattatg

SEQ ID NO: 16326 - RNA, 41 nt, synthetic construct
  source 1..41: mol_type = other RNA
agagagtagggagagctccccaggcccctcgtgttattatg

SEQ ID NO: 16327 - RNA, 41 nt, synthetic construct
  source 1..41: mol_type = other RNA
agagagtaaggagagctccccaggccccccctgttattatg

SEQ ID NO: 16328 - RNA, 41 nt, synthetic construct
  source 1..41: mol_type = other RNA
agagagtagcgagagctcccaaggcccctcatgttattatg

SEQ ID NO: 16329 - RNA, 51 nt, synthetic construct
  source 1..51: mol_type = other RNA
attcaagagagtagggagttctccccaggcttcccctggtattatgggggt

SEQ ID NO: 16330 - RNA, 51 nt, synthetic construct
  source 1..51: mol_type = other RNA
attcaagagagtagggcgggctccccaggcccttcctattattatgggggt

SEQ ID NO: 16331 - RNA, 51 nt, synthetic construct
  source 1..51: mol_type = other RNA
attcaagagagtagggatggctcctaaggcccctctgattattatgggggt

SEQ ID NO: 16332 - RNA, 51 nt, synthetic construct
  source 1..51: mol_type = other RNA
attcaagagagtaaggagcgctccccaggctcctcctgttattatgggggt

SEQ ID NO: 16333 - RNA, 61 nt, synthetic construct
  source 1..61: mol_type = other RNA
atggtattcaagagagtagggcgggctccccaggcccttcctattattaggggggtctggg

SEQ ID NO: 16334 - RNA, 61 nt, synthetic construct
  source 1..61: mol_type = other RNA
atggtattcaagagagtggtgagggatccccaggcccctcctgttattataggggtctggg

SEQ ID NO: 16335 - RNA, 61 nt, synthetic construct
  source 1..61: mol_type = other RNA
atggtattcaagagagtaggtaggggtccccaggcccctcctgttatttggggggtctggg

SEQ ID NO: 16336 - RNA, 61 nt, synthetic construct
  source 1..61: mol_type = other RNA
atggtattcaagagagtagggaaggctcctcaggcccctctgattattatgggggtctggg

SEQ ID NO: 16337 - RNA, 71 nt, synthetic construct
  source 1..71: mol_type = other RNA
tattgatggtaatcaagagagtagggcgggctccccaggcccttcctattattaggggggcctgggatgga

SEQ ID NO: 16338 - RNA, 71 nt, synthetic construct
  source 1..71: mol_type = other RNA
tattgatggtattcaagagagaagggagggctccccaggccttcgctgttattatggaagtctgggatgga

SEQ ID NO: 16339 - RNA, 71 nt, synthetic construct
  source 1..71: mol_type = other RNA
tattgatggtattcgagacagtaaggagagctccccaggccccccctgtaattatgggggtctgggatgga

What is claimed is:

1. A sequence for forming an editing substrate together with a target RNA editing site, wherein
the sequence, in the form of a complementary strand, forms a double-stranded secondary structure with upstream and downstream portions of the target RNA editing site, wherein
a structure of the double-stranded secondary structure comprises at least one of sets of features indicated by i to x:
i. 0 to 4 mismatches, 0 to 7 wobble base pairs, 0 to 3 internal loops, 0 to 5 bulges, and 0 to 12 deletions from −100 to −81 of the editing site;
ii. 0 to 5 mismatches, 0 to 7 wobble base pairs, 0 to 5 internal loops, 0 to 5 bulges, and 0 to 15 deletions from −80 to −61 of the editing site;
iii. 0 to 5 mismatches, 0 to 7 wobble base pairs, 0 to 3 internal loops, 0 to 5 bulges, and 0 to 18 deletions from −60 to −41 of the editing site;
iv. 0 to 4 mismatches, 0 to 7 wobble base pairs, 0 to 3 internal loops, 0 to 8 bulges, and 0 to 11 deletions from −40 to −21 of the editing site;
v. 0 to 5 mismatches, 0 to 6 wobble base pairs, 0 to 4 internal loops, 0 to 5 bulges, and 0 to 9 deletions from −20 to −1 of the editing site;
vi. 0 to 5 mismatches, 0 to 7 wobble base pairs, 0 to 3 internal loops, 0 to 3 bulges, and 0 to 5 deletions from 0 to 19 of the editing site;
vii. 0 to 4 mismatches, 0 to 7 wobble base pairs, 0 to 3 internal loops, 0 to 6 bulges, and 0 to 9 deletions from 20 to 39 of the editing site;
viii. 0 to 5 mismatches, 0 to 6 wobble base pairs, 0 to 3 internal loops, 0 to 5 bulges, and 0 to 17 deletions from 40 to 59 of the editing site;
ix. 0 to 5 mismatches, 0 to 8 wobble base pairs, 0 to 4 internal loops, 0 to 5 bulges, and 0 to 19 deletions from 60 to 79 of the editing site; and
x. 0 to 4 mismatches, 0 to 6 wobble base pairs, 0 to 3 internal loops, 0 to 5 bulges, and 0 to 19 deletions from 80 to 100 of the editing site.

2. The sequence according to claim 1, wherein the double-stranded secondary structure is one selected from structures Struc1 to Struc1196.

3. The sequence according to claim 1, wherein a motif of the target RNA editing site, and one base upstream of and one base downstream of the RNA editing site is NAN.

4. The sequence according to claim 3, wherein the motif of the target RNA editing site, and one base upstream of and one base downstream of the RNA editing site is one or more selected from a group consisting of UAG, UAU, UAC, UAA, AAU, AAC, AAG, AAA, CAU, CAG, CAC, CAA, GAU, GAC, GAA and GAG.

5. The sequence according to claim 3, wherein the double-stranded secondary structure is selected from Struc1 to Struc1196.

6. The sequence according to claim 4, wherein,
the motif of the target RNA editing site, and one base upstream of and one base downstream of the RNA editing site is UAA, and the double-stranded secondary structure is selected from Struc1 to Struc143;
the motif of the target RNA editing site, and one base upstream of and one base downstream of the RNA editing site is UAG, and the double-stranded secondary structure is selected from Struc144 to Struc260;
the motif of the target RNA editing site, and one base upstream of and one base downstream of the RNA editing site is UAU, and the double-stranded secondary structure is selected from Struc261 to Struc320;
the motif of the target RNA editing site, and one base upstream of and one base downstream of the RNA editing site is UAC, and the double-stranded secondary structure is selected from Struc321 to Struc395;
the motif of the target RNA editing site, and one base upstream of and one base downstream of the RNA editing site is CAA, and the double-stranded secondary structure is selected from Struc396 to Struc515;
the motif of the target RNA editing site, and one base upstream of and one base downstream of the RNA editing site is CAC, and the double-stranded secondary structure is selected from Struc516 to Struc541;
the motif of the target RNA editing site, and one base upstream of and one base downstream of the RNA editing site is AAG, and the double-stranded secondary structure is selected from Struc542 to Struc684;
the motif of the target RNA editing site, and one base upstream of and one base downstream of the RNA editing site is AAC, and the double-stranded secondary structure is selected from Struc685 to Struc767;
the motif of the target RNA editing site, and one base upstream of and one base downstream of the RNA editing site is GAA, and the double-stranded secondary structure is selected from Struc768 to Struc809;
the motif of the target RNA editing site, and one base upstream of and one base downstream of the RNA editing site is GAG, and the double-stranded secondary structure is selected from Struc810 to Struc875;
the motif of the target RNA editing site, and one base upstream of and one base downstream of the RNA editing site is AAU, and the double-stranded secondary structure is selected from Struc876 to Struc982;
the motif of the target RNA editing site, and one base upstream of and one base downstream of the RNA editing site is CAG, and the double-stranded secondary structure is selected from Struc983 to Struc1085; or
the motif of the target RNA editing site, and one base upstream of and one base downstream of the RNA editing site is CAU, and the double-stranded secondary structure is selected from Struc1086 to Struc1196.

7. The sequence according to claim 1, wherein structural features of the double-stranded secondary structure are as shown in Table 1.

8. The sequence according to claim 1, wherein the complementary strand is complementarily base-paired at a non-mismatch site,
non-deletion site,
non-bulge site,
non-internal loop site, or
non-wobble-base-pairing site.

9. The sequence according to claim 1, wherein the sequence forming an editing substrate together with a target RNA editing site is 25 bp to 300 bp in length.

10. The sequence according to claim 1, wherein the sequence forming an editing substrate together with a target RNA editing site is 25 bp to 151 bp in length.

11. An mcRNA, comprising a mimic domain, wherein a sequence of the mimic domain is the sequence according to claim 1, and forms the double-stranded secondary structure together with a target RNA to be edited.

12. The mcRNA according to claim 11, wherein the mcRNA further comprises binding domains located at both ends of the mimic domain and complementarily paired with regions other than the double-stranded secondary structure of the target RNA to be edited.

13. The mcRNA according to claim 12, wherein the binding domain is 0 to 55 bp in length on a single side.

14. The mcRNA according to claim 12, wherein a sequence of the mcRNA is any one selected from sequences of SEQ ID NOs.: 1 to 16083.

15. A method for designing the mcRNA according to claim 12, comprising the following steps:
S1, obtaining a reference sequence: using a strand of a reference secondary structure where an editing site is located is an editing strand of the reference secondary structure and the other strand as a complementary strand of the reference secondary structure, and obtaining nucleotide sequences of both strands, respectively;
S2, obtaining a pre-mcRNA sequence of a target editing site: extending a preset length upstream and downstream from a site to be edited as a starting point to obtain a template sequence of a mimic domain, namely a target editing strand; and designing a sequence complementarily paired with the template sequence as the pre-mcRNA sequence;
S3, designing an mcRNA mimic domain: aligning the sequence of the target editing strand to a sequence of the editing strand of the reference secondary structure by extending from the editing site to both ends; aligning the pre-mcRNA sequence to a sequence of the complementary strand of the reference secondary structure;
when an alignment result of the sequence of the target editing strand and the sequence of the editing strand of the reference secondary structure indicates consistency, setting a corresponding position of the mcRNA mimic domain to the corresponding sequence of the complementary strand of the reference secondary structure; and
when the alignment result of the sequence of the target editing strand and the sequence of the editing strand of the reference secondary structure indicates inconsistency, setting and designing the corresponding position of the mcRNA mimic domain to a sequence forming a same structure as the corresponding reference secondary structure together with the target editing site; and
S4, designing mcRNA binding domains: on the basis of the mcRNA mimic domain designed in step S3, extending complementarily paired sequences a preset length from both ends of the mimic domain to form the binding domains.

16. An RNA editing reagent or composition, comprising:
the sequence according to claim 1; and/or
an mcRNA comprising a mimic domain, wherein a sequence of the mimic domain is the sequence according to claim 1, and forms the double-stranded secondary structure together with a target RNA to be edited.

17. A method of editing a target RNA in a cell, comprising:
introducing an oligonucleotide comprising the sequence according to claim 1; and/or
an mcRNA comprising a mimic domain, wherein a sequence of the mimic domain is the sequence according to claim 1, and forms the double-stranded secondary structure together with a target RNA to be edited.

18. The method according to claim 17, wherein the target RNA is ATP7B gene, FGFR gene, TP53 gene, APC gene, SERPINA1 gene, MECP2 gene, or SCN1A gene.

19. A method for treating a disease or disorder in a subject, comprising:
treating the disease or disorder by providing the sequence according to claim 1; and/or
an mcRNA comprising a mimic domain, wherein a sequence of the mimic domain is the sequence according to claim 1, and forms the double-stranded secondary structure together with a target RNA to be edited
to the subject.

20. The method according to claim 19, wherein the disease or disorder is an inherited genetic disease, or a disease or disorder associated with one or more acquired gene mutations.
